(19) United States
(12) Patent Application Publication
(10) Pub. No.: US 2005/0037444 A1
(43) Pub. Date: Feb. 17, 2005

(54) Method for identification isolation and production of antigens to a specific pathogen

(76) Inventors: Andreas Meinke, Pressbaum (AT); Eszter Nagy, Vienna (AT); Uwe von Ahsen, Vienna (AT); Christoph Klade, Neustadt (AT); Tamas Henics, Vienna (AT); Wolfgang Zauner, Vienna (AT); Duc Bui Minh, Vienna (AT); Oresta Vytvytska, Vienna (AT); Hildegard Etz, Vienna (AT); Agnieszka Dryla, Vienna (AT); Thomas Weichhart, Boheimkirchen (AT); Martin Hafner, Vienna (AT); Brigitte Tempelmaier, Vienna (AT); Claire M. Fraser, Potomac, MD (US); Steven Gill, Frederick, MD (US)

Correspondence Address: Mark B Wilson;Fulbright & Jaworski, Suite 2400, 600 Congress Avenue, Austin, TX, 78701, US

(21) Appl. No.: 10/470,048

(22) PCT Filed: Jan. 21, 2002
(86) PCT No.: PCT/EP02/00546

(30) Foreign Application Priority Data
Jan. 26, 2001 (AT) A 130/01

(51) Int. Cl. G01N 33/53; G01N 33/574; G01N 33/554; G01N 33/569

(52) U.S. Cl. 435/7.23; 435/7.32; 435/7.1

(57) ABSTRACT

Described is a method for identification, isolation and production of hyperimmune serum-reactive antigens from a specific pathogen, a tumor, an allergen or a tissue or host prone to autoimmunity, said antigens being suited for use in a vaccine for a given type of animal or for humans, which is characterized by the following steps:—providing an antibody preparation from a plasma pool of said given type of animal or from a human plasma pool or individual sera with antibodies against said specific pathogen, tumor, allergen or tissue or host prone to auto-immunity,—providing at least one expression library of said specific pathogen, tumor, allergen or tissue or host prone to auto-immunity,—screening said at least one expression library with said antibody preparation,—identifying antigens which bind in said screening to antibodies in said antibody preparation,—screening the identified antigens with individual antibody preparations from individual sera from individuals with antibodies against said specific pathogen, tumor, allergen or tissue or host prone to auto-immunity,—identifying the hyperimmune serum-reactive antigen portion of said identified antigens and which hyperimmune serum-reactive antigens bind to a relevant portion of said individual antibody preparations from said individual sera and—optionally isolating said hyperimmune serum-reactive antigens and producing said hyperimmune serum-reactive antigens by chemical or recombinant methods.

[0001] The invention relates to a method for identification, isolation and production of antigens to a specific pathogen as well as new antigens suitable for use in a vaccine for a given type of animal or for humans.

[0002] Vaccines can save more lives (and resources) than any other medical intervention. Owing to world-wide vaccination programmes the incidence of many fatal diseases has been decreased drastically. Although this notion is valid for a whole panel of diseases, e.g. diphtheria, pertussis, measles and tetanus, there are no effective vaccines for numerous infectious disease including most viral infections, such as HIV, HCV, CMV and many others. There are also no effective vaccines for other diseases, infectious or non-infectious, claiming the lifes of millions of patients per year including malaria or cancer. In addition, the rapid emergence of antibiotic-resistant bacteria and microorganisms calls for alter-native treatments with vaccines being alogical choice. Finally, the great need for vaccines is also illustrated by the fact that infectious diseases, rather than cardiovascular disorders or cancer or injuries remain the largest cause of death and disability in the world.

[0003] Several established vaccines consist of live attenuated organisms where the risk of reversion to the virulent wild-type strain exists. In particular in immunocompromised hosts this can be a live threatening scenario. Alternatively, vaccines are administered as a combination of pathogen-derived antigens together with compounds that induce or enhance immune responses against these antigens (these compounds are commonly termed adjuvant), since these subunit vaccines on their own are generally not effective.

[0004] Whilst there is no doubt that the above vaccines are valuable medical treatments, there is the disadvantage that, due to their complexity, severe side effects can be evoked, e.g. to antigens that are contained in the vaccine that display cross-reactivity with molecules expressed by cells of vaccinated individuals. In addition, existing requirements from regulatory authorities, e.g. the World Health Organization (WHO), the Food and Drug Administration (FDA), and their European counterparts, for exact specification of vaccine composition and mechanisms of induction of immunity, are difficult to meet.

[0005] Some widely used vaccines are whole cell-vaccines (attenuated bacteria or viruses (e.g. Bacille Calmette-Guerin (BCG) (tuberculosis), Measles, Mumps, Rubella, Oral Polio Vaccine (Sabin), killed bacteria or viruses (e.g. Pertussis, Inactivated polio vaccine (Salk)), subunit-vaccines (e.g. Toxoid (Diphtheria, Tetanus)), Capsular polysaccharide (H. influenzae type B), Yeast recombinant subunit (Hepatitis B surface protein).

[0006] A vaccine can contain a whole variety of different antigens. Examples of antigens are whole-killed organisms such as inactivated viruses or bacteria, fungi, protozoa or even cancer cells. Antigens may also consist of subfractions of these organisms/tissues, of proteins, or, in their most simple form, of peptides. Antigens can also be recognized by the immune system in form of glycosylated proteins or peptides and may also be or contain polysaccharides or lipids. Short peptides can be used since for example. cytotoxic T-cells (CTL) recognize antigens in form of short usually 8-11 amino acids long peptides in conjunction with major histocompatibility complex (MHC). B-cells can recognize linear epitopes as short as 4-5 amino acids, as well as three dimensional structures (conformational epitopes). In order to obtain sustained, antigen-specific immune responses, adjuvants need to trigger immune cascades that involve all cells of the immune system necessary. Primarily, adjuvants are acting, but are not restricted in their mode of action, on so-called antigen presenting cells (APCs). These cells usually first encounter the antigen(s) followed by presentation of processed or unmodified antigen to immune effector cells. Intermediate cell types may also be involved. Only effector cells with the appropriate specificity are activated in a productive immune response. The adjuvant. may also locally retain antigens and co-injected other factors. In addition the adjuvant may act as a chemoattractant for other immune cells or may act locally and/or systemically as a stimulating agent for the immune system.

[0007] Antigen presenting cells belong to the innate immune system, which has evolved as a first line host defence that limits infection early after exposure to microorganisms. Cells of the innate immune system recognize patterns or relatively non-specific structures expressed on their targets rather than more sophisticated, specific structures which are recognized by the adaptive immune system. Examples of cells of the innate immune system are macrophages and dendritic cells but also granulocytes (e.g. neutrophiles), natural killer cells and others. By contrast, cells of the adaptive immune system recognize specific, antigenic structures, including peptides, in the case of T-cells and peptides as well as three-dimensional structures in the case of B-cells. The adaptive immune system is much more specific and sophisticated than the innate immune system and improves upon repeated exposure to a given pathogen/antigen. Phylogenetically, the innate immune system is much older and can be found already in very primitive organisms. Nevertheless, the innate immune system is critical during the initial phase of antigenic exposure since, in addition to containingpathogens, cells of the innate immune system, i.e. APCs, prime cells of the adaptive immune system and thus trigger specific immune responses leading to clearance of the intruders. In sum, cells of the innate immune system and in particular APCs play a critical role during the induction phase of immune responses by a) containing infections by means of a primitive pattern recognition system and b) priming cells of the adaptive immune system leading to specific immune responses and memory resulting in clearance of intruding pathogens or of other targets. These mechanisms may also be important to clear or contain tumor cells.

[0008] The antigens used for such vaccines have often been selected by chance or by easiness of availability. There is a demand to identify efficient antigens for a given pathogen or—preferably—an almost complete set of all antigens of a given pathogen which are practically (clinically) relevant. Such antigens may be preferred antigen candidates in a vaccine.

[0009] It is therefore an object of the present invention to comply with these demands and to provide a method with which such antigens may be provided and with which a practically complete set of antigens of e.g. a given pathogen may be identified with a given serum as antibody source. Such a method should also be suitable for rapidly changing pathogens which evolve a fast resistance against common drugs or vaccines. The method should also be applicable to identify and isolate tumor antigens, allergens, autoimmune antigens.

[0010] Therefore, the present invention provides a method for identification, isolation and production of hyperimmune serum-reactive antigens from a specific pathogen, a tumor, an allergen or a tissue or host prone to auto-immunity, especially from a specific pathogen, said antigens being suited for use in a vaccine for a given type of animal or for humans, said method being characterized by the following steps:
[0011] providing an antibody preparation from a plasma pool of said given type of animal or from a human plasma pool or individual sera with antibodies against said specific pathogen, a tumor, an allergen or a tissue or host prone to auto-immunity,
[0012] providing at least one expression library of said specific pathogen, a tumor, an allergen or a tissue or host prone to auto-immunity,
[0013] screening said at least one expression library with said antibody preparation,
[0014] identifying antigens which bind in said screening to antibodies in said antibody preparation,
[0015] screening the identified antigens with individual antibody preparations from individual sera from individuals with antibodies against said specific pathogen, tumor, allergen or tissue or host prone to auto-immunity,
[0016] identifying the hyperimmune serum-reactive antigen portion of said identified antigens which hyperimmune serum-reactive antigens bind to a relevant portion of said individual antibody preparations from said individual sera and
[0017] optionally isolating said hyperimmune serum-reactive antigens and producing said hyperimmune serum-reactive antigens by chemical or recombinant methods.

[0018] This method is also suitable in general for identifying a practically complete set of hyperimmune serum-reactive antigens of a specific pathogen with given sera as antibody sources, if at least three different expression libraries are screened in a pathogen/antigen identification programme using the method according to the present invention. The present invention therefore also relates to a method for identification, isolation and production of a practically complete set of hyperimmune serum-reactive antigens of a specific pathogen, said antigens being suited for use in a vaccine for a given type of animal or for humans, which is characterized by the following steps:
[0019] providing an antibody preparation from a plasma pool of said given type of animal or from a human plasma pool or individual sera with antibodies against said specific pathogen,
[0020] providing at least three different expression libraries of said specific pathogen,
[0021] screening said at least three different expression libraries with said antibody preparation,
[0022] identifying antigens which bind in at least one of said at least three screenings to antibodies in said antibody preparation,
[0023] screening the identified antigens with individual antibody preparations from individual sera from individuals with antibodies against said specific pathogen,
[0024] identifying the hyperimmune serum-reactive antigen portion of said identified antigens which hyperimmune serum-reactive antigens bind to a relevant portion of said individual antibody preparations from said individual sera,
[0025] repeating said screening and identification steps at least once,
[0026] comparing the identified hyperimmune serum-reactive antigens identified in the repeated screening and identification steps with the identified hyperimmune serum-reactive antigens identified in the initial screening and identification steps,
[0027] further repeating said screening and identification steps, if at least 5% of the hyperimmune serum-reactive antigens have been identified in the repeated screening and identification steps only, until less than 5% of the hyperimmune serum-reactive antigens are identified in a further repeating step only to obtain a complete set of hyperimmune serum-reactive antigens of a specific pathogen and
[0028] optionally isolating said hyperimmune serum-reactive antigens and producing said hyperimmune serum-reactive antigens by chemical or recombinant methods.

[0029] The method according to the present invention mainly consists of three essential parts, namely 1. identifying hyperinmune serum sources containing specific antibodies against a given pathogen, 2. screening of suitable expression libraries with a suitable antibody preparation wherein candidate antigens (or antigenic fragments of such antigens) are selected, and—3. in a second screening round, wherein the hyperimmune serum-reactive antigens are identified by their ability to bind to a relevant portion of individual antibody preparations from individual sera in order to show that these antigens are practically relevant and not only hyperimmune serum-reactive, but also widely immunogenic (i.e. that a lot of individual sera react with a given antigen). With the present method it is possible to provide a set of antigens of a given pathogen which is practically complete with respect to the chosen pathogen and the chosen serum. Therefore, a bias with respect to “wrong” antigen candidates or an incomplete set of antigens of a given pathogen is excluded by the present method.

[0030] Completeness of the antigen set of a given pathogen within the meaning of the present invention is, of course, dependent on the completeness of the expression libraries used in the present method and on the quality and size of serum collections (number of individual plasmas/sera) tested , both with respect to representability of the library and usefulness of the expression system. Therefore, preferred embodiments of the present method are characterized in that at least one of said expression libraries is selected from a ribosomal display library, a bacterial surface library and a proteome.

[0031] A serum collection used in the present invention should be tested against a panel of known antigenic compounds of a given pathogen, such as polysaccharide, lipid and proteinaceous components of the cell wall, cell membranes and cytoplasma, as well as secreted products. Preferably, three distinct serum collections are used: 1. With very stable antibody repertoire: normal adults, clinically healthy people, who overcome previous encounters or currently carriers of e.g. a given pathogen without acute disease and symptoms, 2. With antibodies induced acutally by the presence of the pathogenic organism: patients with acute disease with different manifestations (e.g. S. aureus sepsis or wound infection, etc.), 3. With no specific antibodies at all (as negative controls): 5-8 months old babies who lost the maternally transmitted immunoglobulins 5-6 months after birth. Sera have to react with multiple pathogen-specific antigens in order to consider hyperimmune for a given pathogen (bacteria, fungus, worm or otherwise), and for that relevant in the screening method according to the present invention.

[0032] In the antigen identification programme for identifying a complete set of antigens according to the present invention, it is preferred that said at least three different expression libraries are at least a ribosomal display library, a bacterial surface library and a proteome. It has been observed that although all expression libraries may be complete, using only one or two expression libraries in an antigen identification programme will not lead to a complete set of antigens due to preferential expression properties of each of the different expression libraries. While it is therefore possible to obtain hyperimmune serum-reactive antigens by using only one or two different expression libraries, this might in many cases not finally result in the identification of a complete set of hyperimmune serum-reactive antigens. Of course, the term “complete” according to the present invention does not indicate a theoretical maximum but is indeed a practical completeness, i.e. that at least 95% of the practically relevant antigens or antigenic determinants have been identified of a given pathogen. The practical relevance is thereby defined by the occurrence of antibodies against given antigens in the patient population.

[0033] According to the present invention also serum pools or plasma fractions or other pooled antibody containing body fluids are “plasma pools”.

[0034] An expression library as used in the present invention should at least allow expression of all potential antigens, e.g. all surface proteins of a given pathogen. With the expression libraries according to the present invention, at least one set of potential antigens of a given pathogen is provided, this set being preferably the complete theoretical complement of (poly-)peptides encoded by the pathogen's genome (i.e. genomic libraries as described in Example 2) and expressed either in a recombinant host (see Example 3) or in vitro (see Example 4). This set of potential antigens can also be a protein preparation, in the case of extracellular pathogens preferably a protein preparation containing surface proteins of said pathogen obtained from said pathogen grown under defined physiological conditions (see Example 5). While the genomic approach has the potential to contain the complete set of antigens, the latter one has the advantage to contain the proteins in their naturally state i.e. including for instance post-translational modifications or processed forms of these proteins, not obvious from the DNA sequence. These or any other sets of potential antigens from a pathogen, a tumor, an allergen or a tissue or host prone to auto-immunity are hereafter referred to as “expression library”. Expression libraries of very different kinds may be applied in the course of the present invention. Suitable examples are given in e.g. Ausubel et al., 1994. Especially preferred are expression libraries representing a display of the genetic set of a pathogen in recombinant form such as in vitro translation techniques, e.g. ribosomal display, or prokaryotic expression systems, e.g. bacterial surface expression libraries or which resemble specific physiological expression states of a given pathogen in a given physiological state, such as a proteome.

[0035] Ribosome display is an established method in recombinant DNA technology, which is applicable for each specific pathogen for the sake of the present invention (Schaffitzel et al, 1999). Bacterial surface display libraries will be represented by a recombinant library of a bacterial host displaying a (total) set of expressed peptide sequences of a given pathogen on e.g. a selected outer membrane protein at the bacterial host membrane (Georgiou et al., 1997). Apart from displaying peptide or protein sequences in an outer membrane protein, other bacterial display techniques, such as bacteriophage display technologies and expression via exported proteins are also preferred as bacterial surface expression library (Forrer et al., 1999; Rodi and Makowski, 1993; Georgiou et al., 1997).

[0036] The antigen preparation for the first round of screening in the method according to the present invention may be derived from any source containing antibodies to a given pathogen. Preferably, if a plasma pool is used as a source for the antibody preparation, a human plasma pool is selected which comprises donors which had experienced or are experiencing an infection with the given pathogen. Although such a selection of plasma or plasma pools is in principle standard technology in for example the production of hyperimmunoglobulin preparations, it was surprising that such technologies have these effects as especially shown for the preferred embodiments of the present invention.

[0037] Preferably the expression libraries are genomic expression libraries of a given pathogen, or alternatively m-RNA, libraries. It is preferred that these genomic or m-RNA libraries are complete genomic or m-RNA expression libraries which means that they contain at least once all possible proteins, peptides or peptide fragments of the given pathogen are expressable. Preferably the genomic expression libraries exhibit a redundancy of at least 2×, more preferred at least 5×, especially at least 10×.

[0038] Preferably, the method according to the present invention comprises screening at least a ribosomal display library, a bacterial surface display library and a proteome with the antibody preparation and identifying antigens which bind in at least two, preferably which bind to all, of said screenings to antibodies in said antibody preparation. Such antigens may then be regarded extremely suited as hyperimmunogenic antigens regardless of their way of expression. Preferably the at least two screenings should at least contain the proteome, since the proteome always represents the antigens as naturally expressed proteins including post-translational modifications, processing, etc. which are not obvious from the DNA sequence.

[0039] The method according to the present invention may be applied to any given pathogen. Therefore, preferred pathogens are selected from the group of bacterial, viral, fungal and protozoan pathogens. The method according to the present invention is also applicable to cancer, i.e. for the identification of tumor-associated antigens, and for the identification of allergens or antigens involved in auto-immune diseases. Of course, especially the recombinant methods are rather simple for pathogens having a small genome or a comparatively small number of expressed proteins (such as bacterial or viral pathogens) and are more complicated for complex (eukaryotic) organisms having large genomes. However, also such large genomic libraries of higher organism pathogens may well be analyzed with the method according to the present invention, at least in a faster and more reliable way than with known methods for identifying suitable antigens.

[0040] Preferred pathogens to beanalyzed or which antigens are to be extracted, respectively, include human immunedeficiency virus (HIV), hepatitis A virus (HAV), hepatitis B virus (HBV), hepatitis C virus (HCV), Rous sarcoma virus (RSV), Epstein-Barr virus (EBV), influenza virus (IV), rotavirus (RV), Staphylococcus aureus (S.aureus), Staphylococcus epidermidis (S. epidermidis), Chlamydia pneumoniae (C. pneumoniae), Chlamydia trachomatis (C. trachomatis), Mycobacterium tuberculosis (M. tuberculosis), Mycobacterium leprae (M. leprae), Streptococcus pneumoniae (S. pneumoniae), Streptococcus pyogenes (S. pyogenes), Streptococcus agalactiae (S. agalactiae), Enterococcus faecalis (E. faecalis), Bacillus anthracis (B. anthracis), Vibrio cholerae (V. cholerae), Borrelia burgdorferi (B. burgdorferi), Plasmodium sp., fungal diseases such as Pneumocystis carinii, Aspergillus sp., Cryptococcus sp., Candida albicans or parasitic infections such as ascariasis (Ascaris lumbricoides) and taeniasis (Taenia saginata). The method according to the present invention is most applicable for bacteria, worms or candida.

[0041] As a model organism for the present application Staphylococcus aureus has been chosen to demonstrate the applicability and efficacy of the method according to the present invention. Especially with respect to the examples it is clear that the invention is easily transferable to all potential pathogens, especially the ones listed above.

[0042] It was surprising that the method according to the present invention allows an efficient and fast biological screening of a given pathogen, especially in view of the fact that only a small fraction of a patient's antibody repertoire is directed to a given pathogen, even in a state where this pathogen is effectively defeated. It has been discovered within the course of the present invention, especially during performance of the S.aureus example that only 1-2% of the antibody repertoire of a patient having high titers against S.aureus are indeed antibodies directed against S.aureus. Moreover, over 70% of this specific 1% portion is directed against non-protein antigens, such as teichoic acid, so that only a total of 0.1% or less of the antibodies are directed to proteinaceous antigens.

[0043] One of the advantages of using recombinant expression libraries, especially ribsome display libraries and bacterial surface display libraries, is that the identified hyperimmune serum-reactive antigens may be instantly produced by expression of the coding sequences of the screened and selected clones expressing the hyperimmune serum-reactive antigens without further recombinant DNA technology or cloning steps necessary.

[0044] The hyperimmune serum-reactive antigens obtainable by the method according to the present invention may therefore be immediately finished to a pharmaceutical preparation, preferably by addition of a pharmaceutically acceptable carrier and/or excipient, immediately after its production (in the course of the second selection step), e.g. by expression from the expression library platform.

[0045] Preferably, the pharmaceutical preparation containing the hyperimmune serum-reactive antigen is a vaccine for preventing or treating an infection with the specific pathogen for which the antigens have been selected.

[0046] The pharmaceutical preparation may contain any suitable auxiliary substances, such as buffer substances, stabilisers or further active ingredients, especially ingredients known in connection of vaccine production.

[0047] A preferable carrier/or excipient for the hyperimmune serum-reactive antigens according to the present invention is a immunostimulatory compound for further stimulating the immune response to the given hyperimmune serum-reactive antigen. Preferably the immunostimulatory compound in the pharmaceutical preparation according to the present invention is selected from the group of polycationic substances, especially polycationic peptides, immunostimulatory deoxynucleotides, alumn, Freund's complete adjuvans, Freund's incomplete adjuvans, neuroactive compounds, especially human growth hormone, or combinations thereof.

[0048] The polycationic compound(s) to be used according to the present invention may be any polycationic compound which shows the characteristic effects according to the WO 97/30721. Preferred polycationic compounds are selected from basic polypeptides, organic polycations, basic polyamino acids or mixtures thereof. These polyamino acids should have a chain length of at least 4 amino acid residues (see: Tuftsin as described in Goldman et al. (1983)). Especially preferred are substances like polylysine, polyarginine and polypeptides containing more than 20%, especially more than 50% of basic amino acids in a range of more than 8, especially more than 20, amino acid residues or mixtures thereof. Other preferred polycations and their pharmaceutical compositons are described in WO 97/30721 (e.g. polyethyleneimine) and WO 99/38528. Preferably these polypeptides contain between 20 and 500 amino acid residues, especially between 30 and 200 residues.

[0049] These polycationic compounds may be produced chemically or recombinantly or may be derived from natural sources.

[0050] Cationic (poly)peptides may also be anti-microbial with properties as reviewed in Ganz et al, 1999; Hancock, 1999. These (poly)peptides may be of prokaryotic or animal or plant origin or may be produced chemically or recombinantly (Andreu et al., 1998; Ganz et al., 1999; Simmaco et al., 1998). Peptides may also belong to the class of defensins (Ganz, 1999; Ganz et al., 1999). Sequences of such peptides can be, for example, be found in the Antimicrobial Sequences Database under the following internet address:
[0051] http://www.bbcm.univ.trieste.it/˜tossi/pag2.html

[0052] Such host defence peptides or defensives are also a preferred form of the polycationic polymer according to the present invention. Generally, a compound allowing as an end product activation (or down-regulation) of the adaptive immune system, preferably mediated by APCs (including dendritic cells) is used as polycationic polymer.

[0053] Especially preferred for use as polycationic substance in the present invention are cathelicidin derived antimicrobial peptides or derivatives thereof (International patent application PCT/EP01/09529, incorporated herein by reference), especially antimicrobial peptides derived from mammal cathelicidin, preferably from human, bovine or mouse.

[0054] Polycationic compounds derived from natural sources include HIV-REV or HIV-TAT (derived cationic peptides, antennapedia peptides, chitosan or other derivatives of chitin) or other peptides derived from these peptides or proteins by biochemical or recombinant production. Other preferred polycationic compounds are cathelin or related or derived substances from cathelin. For example, mouse cathelin is a peptide which has the amino acid sequence NH₂-RLAGLLRKGGEKIGEKLKKIGOKIKNFFQKLVPQPE-COOH. Related or derived cathelin substances contain the whole or parts of the cathelin sequence with at least 15-20 amino acid residues. Derivations may include the substitution or modification of the natural amino acids by amino acids which are not among the 20 standard amino acids. Moreover, further cationic residues may be introduced into such cathelin molecules. These cathelin molecules are preferred to be combined with the antigen. These cathelin molecules surprisingly have turned out to be also effective as an adjuvant for a antigen without the addition of further adjuvants. It is therefore possible to use such cathelin molecules as efficient adjuvants in vaccine formulations with or without further immunactivating substances.

[0055] Another preferred polycationic substance to be used according to the present invention is a synthetic peptide containing at least 2 KLK-motifs separated by a linker of 3 to 7 hydrophobic amino acids (International patent application PCT/EP01/12041, incorporated herein by reference).

[0056] Immunostimulatory deoxynucleotides are e.g. neutral or artificial CpG containing DNA, short stretches of DNA derived. from non-vertebrates or in form of short oligonucleotides (ODNs) containing non-methylated cytosine-guanine di-nucleotides (CpG) in a certain base context (e.g. Krieg et al., 1995) but also inosine containing ODNs (I-ODNs) as described in WO 01/93905.

[0057] Neuroactive compounds, e.g. combined with polycationic substances are described in WO 01/24822.

[0058] According to a preferred embodiment the individual antibody preparation for the second round of screening are derived from patients with have suffered from an acute infection with the given pathogen, especially from patients who show an antibody titer to the given pathogen above a certain minimum level, for example an antibody titer being higher than 80 percentile, preferably higher than 90 percentile, especially higher than 95 percentile of the human (patient or carrier) sera tested. Using such high titer individual antibody preparations in the second screening round allows a very selective identification of the hyperimmune serum-reactive antigens to the given pathogen.

[0059] It is important that the second screening with the individual antibody preparations (which may also. be the selected serum) allows a selective identification of the hyperimmune serum-reactive antigens from all the promising candidates from the first round. Therefore, preferably at least 10 individual antibody preparations (i.e. antibody preparations (e.g. sera) from at least 10 different individuals having suffered from an infection to the chosen pathogen) should be used in identifying these antigens in the second screening round. Of course, it is possible to use also less than 10 individual preparations, however, selectivity of the step may not be optimal with a low number of individual antibody preparations. On the other hand, if a given hyperimmune serum-reactive antigen (or an antigenic fragment thereof) is recognized in at least 10 individual antibody preparations, preferably at least 30, especially at least 50 individual antibody preparations, identification of hyperimmune serum-reactive antigen is also selective enough for a proper identification. Hyperimmune serum-reactivity may of course be tested with as many individual preparations as Possible (e.g. with more than 100 or even with more than 1000).

[0060] Therefore, the relevant portion of the hyperimmune serum-reactive antibody preparation according to the method of the present invention should preferably be at least 10, more preferred at least 30, especially at least 50 individual antibody preparations. Alternatively (or in combination) hyperimmune serum-reactive antigen may preferably be also identified with at least 20%, preferably at least 30%, especially at least 40% of all individual antibody preparations used in the second screening round.

[0061] According to a preferred embodiment of the present invention, the sera from which the individual antibody preparations for the second round of screening are prepared (or which are used as antibody preparations), are selected by their titer against the specific pathogen (e.g. against a preparation of this pathogen, such as a lysate, cell wall components and recombinant proteins). Preferably, some are selected with a total IgA titer above 4000 U, especially above 6000 U, and/or an IgG titer above 10 000 U, especially above 12 000 U (U=units, calculated from the OD_{405 nm}reading at a given dilution) when whole organism (total lysate or whole cells) is used as antigen in ELISA. Individual proteins with Ig titers of above 800-1000 U are specifically preferred for selecting the hyperimmune serum-reactive antigens according to the present invention only for total titer. The statement for individual proteins can be derived from FIG. 9.

[0062] According to the demonstration example which is also a preferred embodiment of thepresent invention the given pathogen is a Staphylococcus pathogen, especially Staphylococcus aureus and Staphylococcus epidermidis. Staphylococci are opportunistic pathogens which can cause illnesses which range from minor infections to life threatening diseases. Of the large number of Staphylococci at least 3 are commonly associated with human disease: S. aureus, S. epidermidis and rarely S. saprophyticus (Crossley and Archer, 1997). S. aureus has been used within the course of the present invention as an illustrative example of the way the present invention functions. Besides that, it is also an important organism with respect to its severe pathogenic impacts on humans. Staphylococcal infections are imposing an increasing threat in hospitals worldwide. The appearance and disease causing capacity of Staphylococci are related to the wide-spread use of antibiotics which induced and continue to induce multi-drug resistance. For that reason medical treatment against Staphylococcal infections cannot rely only on antibiotics anymore. Therefore, a tactic change in the treatment of these diseases is desperately needed which aims to prevent infections. Inducing high affinity antibodies of the opsonic and neutralizing type by vaccination helps the innate immune system to eliminate bacteria and toxins. This makes the method according to the present invention an optimal tool for the identification of staphylococcal antigenic proteins.

[0063] Every human being is colonized with S. epidermidis. The normal habitats of S. epidermidis are the skin and the mucous membrane. The major habitats of the most pathogenic species, S. aureus, are the anterior nares and perineum. Some individuals become permanent S. aureus carriers, often with the same strain. The carrier stage is clinically relevant because carriers undergoing surgery have more infections than noncarriers. Generally, the established flora of the nose prevents acquisition of new strains. However, colonization with other strains may occur when antibiotic treatment is given that leads to elimination of the susceptible carrier strain. Because this situation occurs in the hospitals, patients may become colonized with resistant nosocomial Staphylococci. These bacteria have an innate adaptability which is complemented by the widespread and sometimes inappropriate use of antimicrobial agents. Therefore hospitals provide a fertile environment for drug resistance to develop (close contact among sick patients, extensive use of antimicrobials, nosocomial infections). Both S. aureus and S. epidermidis have become resistant to many commonly used antibiotics, most importantly to methicillin (MRSA) and vancomycin (VISA). Drug resistance is an increasingly important public health concern, and soon many infections caused by staphylococci may be untreatable by antibiotics. In addition to its adverse effect on public health, antimicrobial resistance contributes to higher health care costs, since treating resistant infections often requires the use of more toxic and more expensive drugs, and can result in longer hospital stays for infected patients.

[0064] Moreover, even with the help of effective antibiotics, the most serious staphylococcal infections have 30-50% mortality.

[0065] Staphylococci become potentially pathogenic as soon as the natural balance between microorganisms and the immune system gets disturbed, when natural barriers (skin, mucous membrane) are breached. The coagulase-positive S. aureus is the most pathogenic staphylococcal species, feared by surgeons for a long time. Most frequently it causes surgical wound infections, and induces the formation of abscesses. This local infection might become systemic, causing bacteraemia and sepsis. Especially after viral infections and in elderly, it can cause severe pneumonia. S. aureus is also a frequent cause of infections related to medical devices, such as intravascular and percutan catheters (endocarditis, sepsis, peritonitis), prosthetic devices (septic arthritis, osteomyelitis). S. epidermidis causes diseases mostly related to the presence of foreign body and the use of devices, such as catheter related infections, cerebrospinal fluid shunt infections, peritonitis in dialysed patients (mainly CAPD), endocarditis in individuals with prosthetic valves. This is exemplified in immunocompromised individuals such as oncology patients and premature neonates in whom coagulase-negative staphylococcal infections frequently occur in association with the use of intravascular device. The increase in incidence is related to the increased used of these devices and increasing number of immuno-compromised patients.

[0066] Much less is known about S. saprophyticus, another coagulase-negative staphylococci, which causes acute urinary tract infection in previously healthy people. With a few exceptions these are women aged 16-25 years.

[0067] The pathogenesis of staphylococci is multifactorial. In order to initiate infection the pathogen has to gain access to the cells and tissues of the host, that is adhere. S. aureus expresses-surface proteins that promote attachment to the host proteins such as laminin, fibronectin, elastin, vitronectin, fibrinogen and many other molecules that form part of the extracellular matrix (extracellular matrix binding proteins, ECMBP). S. epidermidis is equipped with cell surface molecules which promote adherence to foreign material and through that mechanism establish infection in the host. The other powerful weapons staphylococci use are the secreted products, such as enterotoxins, exotoxins, and tissue damaging enzymes. The toxins kill or misguide immune cells which are important in the host defence. The several different types of toxins are responsible for most of the symptoms during infections.

[0068] Host defence against S. aureus relies mainly on innate immunological mechanisms. The skin and mucous membranes are formidable barriers against invasion by Staphylococci. However, once the skin or the mucous membranes are breached (wounds, percutan catheters, etc), the first line of nonadaptive cellular defence begins its co-ordinate action through complement and phagocytes, especially the polymorphonuclear leukocytes (PMNs). These cells can be regarded as the cornerstones in eliminating invading bacteria. As Staphylococci are primarily extracellular pathogens; the major anti-staphylococcal adaptive response comes from the humoral arm of the immune system, and is mediated through three major mechanisms: promotion of opsonization, toxin neutralisation, and inhibition of adherence. It is believed that opsonization is especially important, because of its requirement for an effective phagocytosis. For efficient opsonization the microbial surface has to be coated with antibodies and complement factors for recognition by PMNs through receptors to the Fc fragment of the IgG molecule or to activated C3b. After opsonization, staphylococci are phagocytosed and killed. Moreover, S. aureus can attach to endothelial cells, and be internalised by a phagocytosis-like process. Antibodies bound to specific antigens on the cell surface of bacteria serve as ligands for the attachment to PMNs and promote phagocytosis. The very same antibodies. bound to the adhesins and other cell surface proteins are expected to neutralize adhesion and prevent colonization.

[0069] There is little clinical evidence that cell mediated immunity has a significant contribution in the defence against Staphylococci, yet one has to admit that the question is not adequately addressed. It is known, however, that Staphylococcus aureus utilizes an extensive array of molecular countermeasures to manipulate the defensive microenvironment of the infected host by secreting polypeptides referred to as superantigens, which target the multireceptor communication between T-cells and antigen-presenting cells that is fundamental to initiating pathogen-specific immune clearance. Superantigens play a critical role in toxic shock syndrome and food poisoning, yet their function in routine infections is not well understood. Moreover, one cannot expect a long lasting antibody (memory) response without the involvement of T-cells. It is also known that the majority of the anti-staphylococcal antibodies are against T-cell independent antigens (capsular polysacharides, lipoteichoic acid, peptidoglycan) without a memory function. The T-cell dependent proteinaceous antigens can elicit long-term protective antibody responses. These staphylococcal proteins and peptides have not yet been determined.

[0070] For all these above mentioned reasons, a tactic change on the war field against staphylococcal infections is badly needed. One way of combating infections is preventing them by active immunisation. Vaccine development against S. aureus has been initiated by several research groups and national institutions worldwide, but there is no effective vaccine approved so far. It has been shown that an antibody-deficiency state contributes to staphylococcal persistence, suggesting that anti-staphylococcal antibodies are important in host defence. Antibodies—added as passive immunisation or induced by active vaccination—directed towards surface components could both prevent bacterial adherence, neutralize toxins and promote phagocytosis. A vaccine based on fibronectin binding protein induces protective immunity against mastitis in cattle and suggest that this approach is likely to work in humans (refs). Taking all this together it is suggestive that an effective vaccine should be composed of proteins or polypeptides, which are expressed by all strains and are able to induce high affinity, abundant antibodies against cell surface components of S. aureus. The antibodies should be IgG1 and/or IgG3 for opsonization, and any IgG subtype and IgA for neutralisation of adherence and toxin action. A chemically defined vaccine must be definitely superior compared to a whole cell vaccine (attenuated or killed), since components of S. aureus which paralyze TH cells (superantigens) or inhibit opsonization (protein A) can be eliminated, and the individual proteins inducing protective antibodies can be selected. Identification of the relevant antigens help to generate effective passive immunisation (humanised monoclonal antibody therapy), which can replace human immunoglobulin administration with all its dangerous side-effects. Neonatal staphylococcal infections, severe septicemia and other life-threatening acute conditions are the primary target of passive immunisation. An effective vaccine offers great potential for patients facing elective surgery in general, and those receiving endovascular devices, in particular. Moreover, patients suffering from chronic diseases which decrease immune responses or undergoing continuous ambulatory peritoneal dialysis are likely to benefit from such a vaccine.

[0071] For the illustrative example concerning Staphylococcus aureus three different approaches have been employed in parallel. All three of these methods are based on the interaction of Staphylococcus proteins or peptides with the antibodies present in human sera with the method according to the present invention. This interaction relies on the recognition of epitopes within the proteins which can be short peptides (linear epitopes) or polypeptide domains (structural epitopes). The antigenic proteins are identified by the different methods using pools of pre-selected sera and—in the second. screening round—by individual selected sera.

[0072] Following the high throughput screening, the selected antigenic proteins are expressed as recombinant proteins or in vitro translated products (in case it can not be expressed in prokaryotic expression systems), and tested in a series of ELISA and Western blotting assays for the assessment of immunogeneicity with a large human serum collection (>100 uninfected, >50 patients sera). The preferred antigens are located on the cell surface or secreted, that is accessible extracellularly. Antibodies against the cell wall proteins (such as the Extracellular matrix binding proteins) are expected to serve double purposes: to inhibit adhesion and promote phagocytosis. The antibodies against the secreted proteins are beneficial in toxin neutralisation. It is also known that bacteria communicate with each other through secreted proteins. Neutralizing antibodies against these proteins will interrupt growth promoting cross-talk between or within staphylococcal species. Bioinformatics (signal sequences, cell wall localisation signals, transmembrane domains) proved to be very useful in assessing cell surface localisation or secretion. The experimental approach includes the isolation of antibodies with the corresponding epitopes and proteins from human serum, and use them as reagents in the following assays: cell surface staining of staphylococci grown under different conditions (FACS, microscopy), determination of neutralizing capacity (toxin, adherence), and promotion of opsonization and phagocytosis (in vitro phagocytosis assay).

[0073] The recognition of linear epitopes by antibodies can be based on sequences as short as 4-5 aa. Of course it does not necessarily mean that these short peptides are capable of inducing the given antibody. in vivo. For that reason the defined epitopes, polypeptides and proteins may further be tested in animals (mainly in mice) for their capacity to induce antibodies against the selected proteins in vivo. The antigens with the proven capability to induce antibodies will be tested in animal models for the ability to prevent infections.

[0074] The antibodies produced against Staphylococci by the human immune system and present in human sera are indicative of the in vivo expression of the antigenic proteins and their immunogenicity.

[0075] Accordingly, novel hyperimmune serum-reactive antigens from Staphylococcus aureus or Staphylococcus epidermidis have been made available by the method according to the present invention. According to another aspect of the present invention the invention relates to a hyperimmune serum-reactive antigen selected from the group consisting of the sequences listed in any one of Tables 2a, 2b, 2c, 2d, 3, 4 and 5, especially selected from the group consisting of Seq.ID No. 56, 57, 59, 60, 67, 70, 72, 73, 74, 75, 76, 77, 78, 79, 80, 81, 82, 85, 87, 88, 89, 90, 92, 95, 96, 97, 99, 100, 101, 102, 103, 104, 106, 108, 110, 112, 114, 116, 118, 120, 122, 126, 128, 132, 134, 138, 140, 142, 151, 152, 154, 155 and hyperimmune fragments thereof. Accordingly, the present invention also relates to a hyperimmune serum-reactive antigen obtainable by the method according to the present invention and being selected from the group consistingof the sequences listed in any one of Tables 2a, 2b, 2c, 2d, 3, 4 and 5, especially selected from the group consisting of Seq.ID No. 56, 57, 59, 60, 67, 70, 72, 73, 74, 75, 76, 77, 78, 79, 80, 81, 82, 85, 87, 88, 89, 90, 92, 95, 96, 97, 99, 100, 101, 102, 103, 104, 106, 108, 110, 112, 114, 116, 118, 120, 122, 126, 128, 132, 134, 138, 140, 142, 151, 152, 154, 155 and hyperimmune fragments thereof. Antigens from Staphylococcus aureus and Staphylococcus epidermidis have been extracted by the method according to the present invention which may be used in the manufacture of a pharmaceutical preparation, especially for the manufacture of a vaccine against Staphylococcus aureus and Staphylococcus epidermidis infections. Examples of such hyperimmune serum-reactive antigens of Staphylococcus aureus and Staphylococcus epidermidis to be used ina pharmaceutical preparation are selected from the group consisting of the sequences listed in any one of Tables 2a, 2b, 2c, 2d, 3, 4 and 5, especially selected from the group consisting of Seq.ID No. 55, 56, 57, 58, 59, 60, 62, 66, 67, 70, 71, 72, 73, 74, 75, 76, 77, 78,. 79, 80, 81, 82, 83, 84, 85, 87, 88, 89, 90, 92, 94, 95, 96, 97, 99, 100, 101, 102, 103, 104, 106, 108, 110, 112, 114, 116, 118, 120, 122, 126, 128, 130, 132, 134, 138, 140, 142, 151, 152, 154, 155, 158 and hyperimmune fragments thereof for the manufacture of a pharmaceutical preparation, especially for the manufacture of a vaccine against Staphylococcus aureus and Staphylococcus epidermidis infections.

[0076] A hyperimmune fragment is defined as a fragment of the identified antigen which is for itself antigenic or may be made antigenic when provided as a hapten. Therefore, also antigen or antigenic fragments showing one or (for longer fragments) only a few amino acid exchanges are enabled with the present invention, provided that the antigenic capacities of such fragments with amino acid exchanges are not severely deteriorated on the exchange(s). i.e. suited for eliciting an appropriate immune response in a individual vaccinated with this antigen and identified by individual antibody preparations from individual sera.

[0077] Preferred examples of such hyperimmune fragments of a hyperimmune serum-reactive antigen are selected from the group consisting of peptides comprising the amino acid sequences of column “predicted immunogenic aa”, “Location of identified immunogenic region” and “Serum reactivity with relevant region” of Tables 2a, 2b, 2c and 2d and the amino acid sequences of column “Putative antigenic surface areas” of Table 4 and 5, especially peptides comprising amino acid No. aa 12-29, 34-40, 63-71, 101-110, 114-122, 130-138, 140-195, 197-209, 215-229, 239-253, 255-274 and 39-94 of Seq.ID No. 55,

[0078] aa 5-39, 111-117, 125-132, 134-141, 167-191, 196-202, 214-232, 236-241, 244-249, 292-297, 319-328, 336-341, 365-380, 385-391, 407-416, 420-429, 435-441, 452-461, 477-488, 491-498, 518-532, 545-556, 569-576, 581-587, 595-602, 604-609, 617-640, 643-651, 702-715, 723-731, 786-793, 805-811, 826-839, 874-889, 37-49, 63-77 and 274-334, of Seq.ID No.56,

[0079] aa 28-55, 82-100, 105-111, 125-131, 137-143, 1-49, of Seq.ID No. 57,

[0080] aa 33-43, 45-51, 57-63, 65-72, 80-96, 99-110, 123-129, 161-171, 173-179, 185-191, 193-200, 208-224, 227-246, 252-258, 294-308, 321-329, 344-352, 691-707, 358-411 and 588-606, of.Seq.ID No. 58,

[0081] aa 16-38, 71-77, 87-94, 105-112, 124-144, 158-164, 169-177, 180-186, 194-204, 221-228, 236-245, 250-267, 336-343, 363-378, 385-394, 406-412, 423-440, 443-449, 401-494, of Seq.ID No. 59,

[0082] aa 18-23, 42-55, 69-77, 85-98, 129-136, 182-188, 214-220, 229-235, 242-248, 251-258, 281-292, 309-316, 333-343, 348-354, 361-367, 393-407, 441-447, 481-488, 493-505, 510-515, 517-527, 530-535, 540-549, 564-583, 593-599, 608-621, 636-645, 656-670, 674-687, 697-708, 726-734, 755-760, 765-772, 785-792, 798-815, 819-824, 826-838, 846-852, 889-904, 907-913, 932-939, 956-964, 982-1000, 1008-1015, 1017-1024., 1028-1034, 1059-1065, 1078-1084, 1122-1129, 1134-1143, 1180-1186, 1188-1194, 1205-1215, 1224-1230, 1276-1283, 1333-1339, 1377-1382, 1415-1421, 1448-1459, 1467-1472, 1537-1545, 1556-1566, 1647-1654, 1666-1675, 1683-1689, 1722-1737, 1740-1754, 1756-1762, 1764-1773, 1775-1783, 1800-1809, 1811-1819, 1839-1851, 1859-1866, 1876-1882, 1930-1939, 1947-1954, 1978-1985, 1999-2007, 2015-2029, 2080-2086, 2094-2100, 2112-2118, 2196-2205, 2232-2243, 198-258, 646-727 and 2104-2206, of Seq.ID No. 60,

[0083] aa 10-29, 46-56, 63-74, 83-105, 107-114, 138-145, 170-184, 186-193, 216-221, 242-248, 277-289, 303-311, 346-360, 379-389, 422-428, 446-453, 459-469, 479-489, 496-501, 83-156, of Seq.ID No. 62,

[0084] aa 14-22, 32-40, 52-58, 61-77, 81-93, 111-117, 124-138, 151-190, 193-214, 224-244, 253-277, 287-295, 307-324, 326-332, 348-355, 357-362, 384-394, 397-434, 437-460, 489-496, 503-510, 516-522, 528-539, 541-547, 552-558, 563-573, 589-595, 602-624, 626-632, 651-667, 673-689, 694-706, 712-739, 756-790, 403-462, of Seq.ID No. 66,

[0085] aa 49-56, 62-68, 83-89, 92-98, 10.9-115, 124-131, 142-159, 161-167, 169-175, 177-188, 196-224, 230-243, 246-252, 34-46, of Seq.ID No. 67,

[0086] aa 11-20, 26-47, 69-75, 84-92, 102-109, 119-136, 139-147, 160-170, 178-185, 190-196, 208-215, 225-233, 245-250, 265-272, 277-284, 300-306, 346-357, 373-379, 384-390, 429-435, 471-481, 502-507, 536-561, 663-688, 791-816, 905-910, 919-933, 977-985, 1001-1010, 1052-1057, 1070-1077, 1082-1087, 1094-1112, 493-587, 633-715 and 704-760, of Seq.ID No.70,

[0087] aa 6-20, 53-63, 83-90, 135-146, 195-208, 244-259, 263-314, 319-327, 337-349, 353-362, 365-374, 380-390, 397-405, 407-415, 208-287 and 286-314, of Seq.ID No. 71,

[0088] aa 10-26, 31-43, 46-58, 61-66, 69-79, 85-92, 100-115, 120-126, 128-135, 149-155, 167-173, 178-187, 189-196, 202-222, 225-231, 233-240, 245-251, 257-263, 271-292, 314-322, 325-334, 339-345, 59-74, of Seq.ID No. 72,

[0089] aa 4-9, 15-26, 65-76, 108-115, 119-128, 144-153, 38-52 and 66-114, of Seq.ID No. 73,

[0090] aa 5-22, 42-50, 74-81, 139-145, 167-178, 220-230, 246-253, 255-264, 137-237 and 250-267, of Seq.ID No. 74,

[0091] aa 10-26, 31-44, 60-66, 99-104, 146-153, 163-169, 197-205, 216-223, 226-238, 241-258, 271-280, 295-315, 346-351, 371-385, 396-407, 440-446, 452-457, 460-466, 492-510, 537-543, 546-551, 565-582, 590-595, 635-650, 672-678, 686-701, 705-712, 714-721, 725-731, 762-768, 800-805, 672-727, of Seq.ID No. 75,

[0092] aa 5-32, 35-48, 55-76, of Seq.ID No. 76,

[0093] aa 7-35, 54-59, 247-261, 263-272, 302-320, 330-339, 368-374, 382-411, 126-143 and 168-186, of Seq.ID No. 77,

[0094] aa 5-24, 88-94, 102-113, 132-143, 163-173, 216-224, 254-269, 273-278, 305-313, 321-327, 334-341, 31-61 and 58-74, of Seq.ID No. 78,

[0095] aa 16-24, 32-39, 43-49, 64-71, 93-99, 126-141, 144-156, 210-218, 226-233, 265-273, 276-284, 158-220, of Seq.ID No. 79,

[0096] aa 49-72, 76-83, 95-105, 135-146, 148-164, 183-205, 57-128, of Seq.ID No. 80,

[0097] aa 6-15, 22-32, 58-73, 82-88, 97-109, 120-131, 134-140, 151-163, 179-185, 219-230, 242-255, 271-277, 288-293, 305-319, 345-356, 368-381, 397-406, 408-420, 427-437, 448-454, 473-482, 498-505, 529-535, 550-563, 573-580, 582-590, 600-605, 618-627, 677-685, 718-725, 729-735, 744-759, 773-784, 789-794, 820-837, 902-908, 916-921, 929-935, 949-955, 1001-1008, 1026-1032, 1074-1083, 1088-1094, 1108-1117, 1137-1142, 1159-1177, 1183-1194, 1214-1220, 1236-1252, 1261-1269, 1289-1294, 1311-1329, 1336-1341, 1406-1413, 1419-1432, 1437-1457, 1464-1503, 1519-1525, 1531-1537, 1539-1557, 1560-1567, 1611-1618, 1620-1629, 1697-1704, 1712-1719, 1726-1736, 1781-1786, 1797-1817, 1848-1854, 1879-1890, 1919-1925, 1946-1953, 1974-1979, 5 to 134, of Seq.ID No. 81,

[0098] aa 6-33, 40-46, 51-59, 61-77, 84-104, 112-118, 124-187, 194-248, 252-296, 308-325, 327-361, 367-393, 396-437, 452-479, 484-520, 535-545, 558-574, 582-614, 627-633, 656-663, 671-678, 698-704, 713-722, 725-742, 744-755, 770-784, 786-800, 816-822, 827-837, 483-511, of Seq.ID No. 82,

[0099] aa 4-19, 57-70, 79-88, 126-132, 144-159, 161-167, 180-198, 200-212, 233-240, 248-255, 276-286, 298-304, 309-323, 332-346, 357-366, 374-391, 394-406, 450-456, 466-473, 479-487, 498-505, 507-519, 521-530, 532-540, 555-565, 571-581, 600-611, 619-625, 634-642, 650-656, 658-665, 676-682, 690-699, 724-733, 740-771, 774-784, 791-797, 808-815, 821-828, 832-838, 876-881, 893-906, 922-929, 938-943, 948-953, 969-976, 1002-1008, 1015-1035, 1056-1069, 1105-1116, 1124-1135, 1144-1151, 1173-1181, 1186-1191, 1206-1215, 1225-1230, 1235-1242, 6-66, 65-124 and 590-604, of Seq.ID No. 83,

[0100] aa 5-32, 66-72, 87-98, 104-112, 116-124, 128-137, 162-168, 174-183, 248-254, 261-266, 289-303, 312-331, 174-249, of Seq.ID No. 84,

[0101] aa 4-21, 28-40, 45-52, 59-71, 92-107, 123-137, 159-174, 190-202, 220-229, 232-241, 282-296, 302-308, 312-331, 21-118, of Seq.ID No. 85,

[0102] aa 9-28, 43-48, 56-75, 109-126, 128-141, 143-162, 164-195, 197-216, 234-242, 244-251, 168-181, of Seq.ID No. 87,

[0103] aa 4-10, 20-42, 50-86, 88-98, 102-171, 176-182, 189-221, 223-244, 246-268, 276-284, 296-329, 112-188, of Seq.ID No. 88,

[0104] aa 4-9, 13-24, 26-34, 37-43, 45-51, 59-73, 90-96, 99-113, 160-173, 178-184, 218-228, 233-238, 255-262, 45-105, 103-166 and 66-153, of Seq.ID No. 89,

[0105] aa 13-27, 42-63, 107-191, 198-215, 218-225, 233-250, 474-367, of Seq.ID No. 90,

[0106] aa 26-53, 95-123, 164-176, 189-199, 8-48, of Seq.ID No. 92,

[0107] aa 7-13, 15-23, 26-33, 68-81, 84-90, 106-117, 129-137, 140-159, 165-172, 177-230, 234-240, 258-278, 295-319, 22-56, 23-99, 97-115, 233-250 and 245-265, of Seq.ID No. 94,

[0108] aa 13-36, 40-49, 111-118, 134-140, 159-164, 173-183, 208-220, 232-241, 245-254, 262-271, 280-286, 295-301, 303-310, 319-324, 332-339, 1-85, 54-121 and 103-185, of Seq.ID No. 95,

[0109] aa 39-44, 46-80, 92-98, 105-113, 118-123, 133-165, 176-208, 226-238, 240-255, 279-285, 298-330, 338-345, 350-357, 365-372, 397-402, 409-415, 465-473, 488-515, 517-535, 542-550, 554-590, 593-601, 603-620, 627-653, 660-665, 674-687, 698-718, 726-739, 386-402, of Seq.ID No. 96,

[0110] aa 5-32, 34-49, 1-43, of Seq.ID No. 97,

[0111] aa 10-27, 37-56, 64-99, 106-119, 121-136, 139-145, 148-178, 190-216, 225-249, 251-276, 292-297, 312-321, 332-399, 403-458, 183-200, of Seq.ID No. 99,

[0112] aa 5-12, 15-20, 43-49, 94-106, 110-116, 119-128, 153-163, 175-180, 185-191, 198-209, 244-252, 254-264, 266-273, 280-288, 290-297, 63-126, of Seq.ID No. 100,

[0113] aa 5-44, 47-55, 62-68, 70-78, 93-100, 128-151, 166-171, 176-308, 1-59, of Seq.ID No. 101,

[0114] aa 18-28, 36-49, 56-62, 67-84, 86-95, 102-153, 180-195, 198-218, 254-280, 284-296, 301-325, 327-348, 353-390, 397-402, 407-414, 431-455, 328-394, of Seq.ID No. 102,

[0115] aa 7-37, 56-71, 74-150, 155-162, 183-203, 211-222, 224-234, 242-272, 77-128, of Seq.ID No. 103,

[0116] aa 34-58, 63-69, 74-86, 92-101, 130-138, 142-150, 158-191, 199-207, 210-221, 234-249, 252-271, 5-48, of Seq.ID No. 104,

[0117] aa 12-36, 43-50, 58-65, 73-78, 80-87, 108-139, 147-153, 159-172, 190-203, 211-216, 224-232, 234-246, 256-261, 273-279, 286-293, 299-306, 340-346, 354-366, 167-181, of Seq.ID No. 106,

[0118] aa 61-75, 82-87, 97-104, 113-123, 128-133, 203-216, 224-229, 236-246, 251-258, 271-286, 288-294, 301-310, 316-329, 337-346, 348-371, 394-406, 418-435, 440-452 of Seq.ID No. 112,

[0119] aa 30-37, 44-55, 83-91, 101-118, 121-128, 136-149, 175-183, 185-193, 206-212, 222-229, 235-242 of Seq.ID No. 114,

[0120] aa 28-38, 76-91, 102-109, 118-141, 146-153, 155-161, 165-179, 186-202, 215-221, 234-249, 262-269, 276-282, 289-302, 306-314, 321-326, 338-345, 360-369, 385-391 of Seq.ID No. 116,

[0121] aa 9-33, 56-62,75-84, 99-105, 122-127, 163-180, 186-192, 206-228, 233-240, 254-262, 275-283, 289-296, 322-330, 348-355, 416-424, 426-438, 441-452, 484-491, 522-528, 541-549, 563-569, 578-584, 624-641, 527-544, of Seq.ID No. 142,

[0122] aa 37-42, 57-62, 121-135, 139-145, 183-190, 204-212, 220-227, 242-248, 278-288, 295-30, 304-309, 335-341, 396-404, 412-433, 443-449, 497-503, 505-513, 539-545, 552-558, 601-617, 629-649, 702-711, 736-745, 793-804, 814-829, 843-858, 864-885, 889-895, 905-913, 919-929, 937-943, 957-965, 970-986, 990-1030, 1038-1049, 1063-1072, 1080-1091, 1093-1116, 1126-1136, 1145-1157, 1163-1171, 1177-1183, 1189-1196, 1211-1218, 1225-1235, 1242-1256, 1261-1269, 624-684, of Seq.ID No. 151,

[0123] aa 8-23, 31-38, 42-49, 61-77, 83-90, 99-108, 110-119, 140-147, 149-155, 159-171, 180-185, 189-209, 228-234, 245-262, 264-275, 280-302, 304-330, 343-360, 391-409, 432-437, 454-463, 467-474, 478-485, 515-528, 532-539, 553-567, 569-581, 586-592, 605-612, 627-635, 639-656, 671-682, 700-714, 731-747, 754-770, 775-791, 797-834, 838-848, 872-891, 927-933, 935-942, 948-968, 976-986, 1000-1007, 1029-1037, 630-700, of Seq.ID No. 152,

[0124] aa 17-25, 27-55, 84-90, 95-101, 115-121, 55-101, of Seq.ID No. 154,

[0125] aa 13-28, 40-46, 69-75, 86-92, 114-120, 126-137, 155-172, 182-193, 199-206, 213-221, 232-238, 243-253, 270-276, 284-290, 22-100, of Seq.ID No. 155 and

[0126] aa 7-19, 46-57, 85-91, 110-117, 125-133, 140-149, 156-163, 198-204, 236-251, 269-275, 283-290, 318-323, 347-363, 9-42 and 158-174, of Seq.ID No. 158,

[0127] aa 7-14, 21-30, 34-50, 52-63, 65-72, 77-84, 109-124, 129-152, 158-163, 175-190, 193-216, 219-234 of Seq.ID.No. 168,

[0128] aa 5-24, 38-44, 100-106, 118-130, 144-154, 204-210, 218-223, 228-243, 257-264, 266-286, 292-299 of Seq.ID.No. 174,

[0129] aa 29-44, 74-83, 105-113, 119-125, 130-148, 155-175, 182-190, 198-211, 238-245 of Seq.ID.No. 176, and fragments comprising at least 6, preferably more than 8, especially more than 10 aa of said sequences. All these fragments individually and each independently form a preferred selected aspect of the present invention.

[0130] Especially suited helper epitopes may also be derived from these antigens. Especially preferred helper epitopes are peptides comprising fragments selected from the peptides mentioned in column “Putative antigenic surface areas” in Tables 4 and 5 and from the group of aa 6-40, 583-598, 620-646 and 871-896 of Seq.ID.No.56, aa 24-53 of Seq.ID.No.70, aa 240-260 of Seq.ID.No.74, aa 1660-1682 and 1746-1790 of Seq.ID.No. 81, aa 1-29, 680-709, and 878-902 of Seq.ID.No. 83, aa 96-136 of Seq.ID.No. 89, aa 1-29, 226-269 and 275-326 of Seq.ID.No. 94, aa 23-47 and 107-156 of Seq.ID.No. 114 and aa 24-53 of Seq.ID.No. 142 and fragments thereof being T-cell epitopes.

[0131] According to another aspect, the present invention relates to a vaccine comprising such a hyperimmune serum-reactive antigen or a fragment thereof as identified above for Staphylococcus aureus and Staphylococcus epidermidis. Such a vaccine may comprise one or more antigens against S. aureus or S. epidermidis. Optionally, such S. aureus or S. epidermidis antigens may also be combined with antigens against other pathogens in a comnination vaccine. Preferably this vaccine further comprises an immunostimulatory substance, preferably selected from the group comprising polycationic polymers, especially polycationic peptides, immunostimulatory deoxynucleotides (ODNs), neuroactive compounds, especially human growth hormone, alumn, Freund's complete or incomplete adjuvans or combinations thereof. Such a vaccine may also comprise the antigen displayed on a surface display protein platform on the surface of a genetically engineered microorganism such as E. coli.

[0132] According to another aspect, the present invention relates to specific preparations comprising antibodies raised against at least one of the Staphylococcus aureus and Staphylococcus epidermidis midis antigens or Staphylococcus aureus and Staphylococcus epidermidis antigen fragments as defined above. These antibodies are preferably monoclonal antibodies.

[0133] Methods for producing such antibody preparations, polyclonal or monoclonal, are well available to the man skilled in the art and properly described in the prior art. A preferred method for producing such monoclonal antibody preparation is characterized by the following steps
[0134] initiating an immune response in a non human animal by administering a Staphylococcus antigen or a fragment thereof, as defined above, to said animal,
[0135] removing the spleen or spleen cells from said animal,
[0136] producing hybridoma cells of said spleen or spleen cells,
[0137] selecting and cloning hybridoma cells specific for said antigen and
[0138] producing the antibody preparation by cultivation of said cloned hybridoma cells and optionally further purification steps.

[0139] Preferably, removing of the spleen or spleen cells is connected with killing said animal.

[0140] Monoclonal antibodies and fragments thereof can be chimerized or humanized (Graziano et al. 1995) to enable repeated administration. Alternatively human monoclonal antibodies and fragments thereof can be obtained from phage-display libraries (McGuinnes et al., 1996) or from transgenic animals (Bruggemann et al., 1996).

[0141] A preferred method for producing polyclonal antibody preparations to said Staphylococcus aureus or Staphylococcus epidermidis antigens identified with the present invention is characterized by the following steps
[0142] initiating an immune response in a non human animal by administering a Staphylococcus antigen or a fragment thereof, as defined above, to said animal,
[0143] removing an antibody containing body fluid from said animal,
[0144] and
[0145] producing the antibody preparation by subjecting said antibody containing body fluid to further purification steps.

[0146] These monoclonal or polyclonal antibody preparations may be used for the manufacture of a medicament for treating or preventing diseases due to staphylococcal infection. Moreover, they may be used for the diagnostic and imaging purposes.

[0147] The method is further described in the following examples and in the figures, but should not be restricted thereto.

[0148] FIG. 1 shows the pre-selection of sera based on anti-staphylococcal antibody titers measured by ELISA.

[0149] FIG. 2 shows the size distribution of DNA fragments in the LSA50/6 library in pMAL4.1.

[0150] FIG. 3 shows the MACS selection with biotinylated human serum. The LSA50/6 library in pMAL9.1 was screened with 10 μg biotinylated, human serum in the first (A) and with 1 μg in the second selection round (B). P.serum, patient serum; B.serum, infant serum. Number of cells selected after the 2^{nd} and 3^{rd} elution are shown for each selection round.

[0151] FIG. 4 shows the serum reactivity with specific clones isolated by bacterial surface display as analyzed by Western blot analysis with patient serum at a dilution of 1:5000.

[0152] FIG. 5 shows peptide ELISA with serum from patients and healthy individuals with an epitope identified by ribosome display.

[0153] FIG. 6 shows representative 2D Immunoblot of S. aureus surface proteins detected with human sera. 800 μg protein from S. aureus/COL grown on BHI were resolved by IEF (pI 4-7) and SDS-PAGE (9-16%), and subsequently transferred to PVDF membrane. After blocking, the membrane was incubated with sera IC35 (1:20,000). Binding of serum IgG was visualized by an anti-human IgG/HfZPO conjugate and ECL development.

[0154] FIG. 7 demonstrates a representative 2D gel showing S. aureus surface proteins stained by Coomassie Blue. 1 mg protein from S. aureus/COL were resolved by IEF (pI 4-7) and SDS-PAGE (9-16%). Spots selected for sequencing after serological proteome analysis are marked.

[0155] FIGS. 8A and 8B show the structure of LPXTG cell wall proteins.

[0156] FIG. 9 shows the IgG response in uninfected (N, C) and infected (P) patients to LPXTGV, a novel antigen and probable surface adhesin of S. aureus, discovered by both the inventive bacterial surface-display and proteomics approaches.

[0157] FIG. 10 shows the surface staining of S. aureus with purified anti-LPXTGV IgGs.

[0158] FIG. 11 shows a 2D gel where S. aureus surface proteins are stained by Coomassie Blue (left). 1 mg protein from S. aureus/agr grown to early log phase was resolved by IEF (pI 6-11) and SDS-PAGE (9-16%). Spots selected for sequencing after serological proteome analysis are marked. Corresponding 2D-immunoblot (right). 800 μg protein from the same preparation was resolved in parallel by 2DE, and subsequently transferred to PVDF membrane. After blocking, the membrane was incubated with the P-pool (1:10,000). Binding of serum IgG was visualized by an anti-human IgG/HRPO conjugate and ECL development.

### EXAMPLES

### Discovery of Novel Staphyloccocus aureus Antigens

### Example 1

### Preparation of Antibodies from Human Serum

[0159] The antibodies produced against staphylococci by the human immune system and present in human sera are indicative of the in vivo expression of the antigenic proteins and their immunogenicity. These molecules are essential for the identification of individual antigens in the approach as the present invention which is based on the interaction of the specific anti-staphylococcal antibodies and the corresponding S. aureus peptides or proteins. To gain access to relevant antibody repertoires, human sera were collected from I. patients with acute S. aureus infections, such as bacteriaemia, sepsis, infections of intravascular and percutan catheters and devices, wound infections, and superficial and deep soft tissue infection. S. aureus was shown to be the causative agent by medical microbiological tests. II. A collection of serum samples from uninfected adults was also included in the present analysis, since staphylococcal infections are common, and antibodies are present as a consequence of natural immunization from previous encounters with Staphylococci from skin and soft tissue infections (furunculus, wound infection, periodontitits etc.).

[0160] The sera were characterized for S. aureus antibodies by a series of ELISA assays. Several styaphylococcal antigens have been used to prove that the titer measured was not a result of the sum of cross-reactive antibodies. For that purpose not only. whole cell S. aureus (protein A deficient) extracts (grown under different conditions) or whole bacteria were used in the ELISA assays, but also individual cell wall components, such as lipoteichoic acid and peptidoglycan isolated from S. aureus., More importantly, a recombinant protein collection was established representing known staphylococcal cell surface proteins for the better characterization of the present human sera collections.

[0161] Recently it was reported that not only IgG, but also IgA serum antibodies can be recognized by the FcRIII receptors of PMNs and promote opsonization (Phillips-Quagliata et ai., 2000; Shibuya et al., 2000). The primary role of IgA antibodies is neutralization, mainly at the mucosal surface. The level of serum IgA reflects the quality, quantity and specificity of the dimeric secretory IgA. For that reason the serum collection was not only analyzed for anti-staphylococcal IgG, but also for IgA levels. In the ELISA assays highly specific secondary reagents were used to detect antibodies from the high affinity types, such as IgG and IgA, and avoided IgM. Production of IgM antibodies occurs during the primary adaptive humoral response, and results in low affinity antibodies, while IgG and IgA antibodies had already under-gone affinity maturation, and are more valuable in fighting or preventing disease

[0162] Experimental procedures

[0163] Enzyme linked immune assay (ELISA). ELISA plates were coated with 2-10 μg/ml of the different antigens in coating buffer (sodium carbonate pH 9.2). Serial dilutions of sera (100-100.000) were made in TBS-BSA. Highly specific (cross-adsorbed) HRP (Horse Radish Peroxidase)-labeled anti-human IgG or anti-human IgA secondary antibodies (Southern Biotech) were used according to the manufacturers' recommendations (˜2.000×). Antigen-antibody complexes were quantified by measuring the conversion of the substrate (ABTS) to colored product based on OD_{405 nm} readings in an automated ELISA reader (Wallace Victor 1420). The titers were compared at given dilution where the dilution response was linear (Table 1). The 100 sera were ranked based on the reactivity against multiple staphylococcal components, and the highest ones (above 90 percentile) were selected for further analysis in antigen identification. Importantly, the anti-staphylococcal antibodies from sera of clinically healthy individuals proved to be very stable, giving the same high ELISA titers against all the staphylococcal antigens measured after 3, 6 and 9 months (data not shown). In contrast, anti-S. aureus antibodies in patients decrease, then disappear after a couple of weeks following the infection (Coloque-Navarro et al, 1998). However, antibodies from patients are very important, since these are direct proof of the in vivo expression of the bacterial antigens tested in or ELISAs or identified as immunogenic during the screens according to the present invention.

[0164] This comprehensive approach followed during antibody characterization is unique, and led to unambiguous identification of anti-staphylococcal hyperimmune sera.

[0165] Purification of antibodies for genomic screening. Five sera from both the patient and the noninfected group were selected based on the overall anti-staphylococcal titers. Antibodies against E. coli proteins were removed by either incubating the heat inactivated sera with whole cell E. coli (DH5a, transformed with pHIE11, grown under the same condition as used for bacterial display) or with E. coli lysate affinity chromatography for ribosome display. Highly enriched preparations of IgG from the pooled, depleted sera were generated by protein G affinity chromatography, according to the manufacturer's instructions (UltraLink Immobilized Protein G, Pierce). IgA antibodies were purified also by affinity chromatography using biotin-labeled anti-human IgA (Southern Biotech) immobilized on Streptavidin-agarose (GIBCO BRL). The efficiency of depletion and purification was checked by SDS-PAGE, Western blotting, ELISA, and protein concentration measurements. For proteomics, the depletion the IgG and IgA preparation was not necessary, since the secondary reagent ensured the specificity.

### Example 2

### Generation of Highly Random, Frame-selected, Small-fragment, Genomic DNA Libraries of Staphylococcus aureus

[0166] Experimental Procedures

[0167] Preparation of staphylococcal genomic DNA. This method was developed as a modification of two previously published protocols (Sohail, 1998, Betley et al., 1984) and originally specifically adapted for the methicillin resistant Staphylococcus aureus strain COL to obtain genomic DNA in high quality and large scale. 500 ml BHI (Brain Heart Infusion) medium supplemented with 5 μg/ml Tetracycline was inoculated with bacteria from a frozen stab and grown with aeration and shaking for 18 h at 37° C. The culture was then harvested in two aliquots of 250 ml each, centrifuged with 1600×g for 15 min and the supernatant was removed. Bacterial pellets were carefully re-suspended in 26 ml of 0.1 mM Tris-HCl, pH 7.6 and centrifuged again with 1600×g for 15 min. Pellets were re-suspended in 20 ml of 1 mM Tris-HCl, pH 7.6, 0.1 mM EDTA and transferred into sterile 50 ml polypropylene tubes. 1 ml of 10 mg/ml heat treated RNase A and 200 U of RNase Ti were added to each tubeand the solution mixed carefully. 250 μl of Lysostaphin (10 mg/ml stock, freshly prepared in ddH₂O) was then added to the tubes, mixed thoroughly and incubated at 40° C. for 10 min in a shaking water bath under continuous agitation. After the addition of 1 ml 10% SDS, 40 μl of Proteinase K (25 mg/ml stock) and 100 μl of Pronase (10 mg/ml), tubes were again inverted several times and incubated at 40° C. for 5 min in a shaking water bath. 3.75 ml of 5 M NaCl and 2.5 ml of cetyl trimethyl-ammonium bromide solution (CTAB) (10% w/v, 4% w/v NaCl) were then added and tubes were further incubated at 65° C. in a shaking water bath for 10 min. Samples were cooled to room temperature and extracted with PhOH/CHCl₃/IAA (25:24:1) and with CHCl₃/IAA (24:1). Aqueous phases were carefully collected and transferred to new sterile 50-ml tubes. To each tube 1.5 ml of Strataclean™ Resin was added, mixed gently but thoroughly and incubated for one minute at room temperature. Samples were centrifuged and the upper layers containing the DNA were collected into clean 50ml-tubes. DNA was precipitated at room temperature by adding 0.6× volume of Isopropanol, spooled from the solution; with a sterile Pasteur pipette and transferred into tubes containing 80% ice cold ethanol. DNA was recovered by centrifuging the precipitates with 10-12,000×g, then dried on air and dissolved in ddH₂O.

[0168] Preparation of small genomic DNA fragments. Genomic DNA fragments were mechanically sheared into fragments ranging in size between 150 and 300 bp using a cup-horn sonicator (Bandelin Sonoplus UV 2200 sonicator equipped with a BB5 cup horn, 10 sec. pulses at 100% power output) or into fragments of size between 50 and 70 bp by mild DNase I treatment (Novagen). It was observed that sonication yielded a much tighter fragment size distribution when breaking the DNA into fragments of the 150-300 bp size range. However, despite extensive exposure of the DNA to ultrasonic wave-induced hydromechanical shearing force, subsequent decrease in fragment size could not be efficiently and reproducibly achieved. Therefore, fragments of 50 to 70 bp in size were obtained by mild DNase I treatment using Novagenfs shotgun cleavage kit. A 1:20 dilution of DNase I provided with the kit was prepared and the digestion was performed in the presence of MnCl₂ in a 60 μl volume at 20° C. for 5 min to ensure double-stranded cleavage by the enzyme. Reactions were stopped with 2 μl of 0.5M EDTA and the fragmentation efficiency was evaluated on a 2% TAE-agarose gel. This treatment resulted in total fragmentation of genomic DNA into near 50-70 bp fragments. Fragments were then blunt-ended twice using T4 DNA Polymerase in the presence of 100 μM each of dNTPs to ensure efficient flushing of the ends. Fragments were used immediately in ligation reactions or frozen at −20° C. for subsequent use.

[0169] Description of the vectors. The vector pMAL4.1 was constructed on a pEH1 backbone (Hashemzadeh-Bonehi et al., 1998) with the Kanamycin resistance gene. In addition it harbors a b-lactamase (bla) gene cloned into the multiple cloning site. The bla gene is preceded by the leader peptide sequence of ompA to ensure efficient secretion across the cytoplasmic membrane. A Sma I restriction site serves for library insertion. The Sma I site is flanked by an upstream FseI site and a downstream NotI site which were used for recovery of the selected fragments. The three restriction sites are inserted after the ompA leader sequence in such a way that the bla gene is transcribed in the −1 reading frame resulting in a stop codon 15 bp after the NotI site. A +1 bp insertion restores the bla ORF so that b-lactamase protein is produced with a consequent gain of Ampicillin resistance.

[0170] The vector pMAL4.31 was constructed on a pASK-IBA backbone (Skerra, 1994) with the b-lactamase gene exchanged with the Kanamycin resistance gene. In addition it harbors a b-lactamase (bla) gene cloned into the multiple cloning site. The sequence encoding mature b-lactamase is preceded by the leader peptide sequence of ompA to allow efficient secretion across the cytoplasmic membrane. Furthermore a sequence encoding the first 12 amino acids (spacer sequence) of mature b-lactamase follows the ompA leader peptide sequence to avoid fusion of sequences immediately after the leader peptidase cleavage site, since e.g. clusters of positive charged amino acids in this region would decrease or abolish translocation across the cytoplasmic membrane (Kajava et al., 2000). A SmaI restriction site serves for library insertion. The SmaI site is flanked by an upstream FseI site and a downstream NotI site which were used for recovery of the selected fragment. The three restriction sites are inserted after the sequence encoding the 12 amino acid spacer sequence in such a way that the bla gene is transcribed in the −1 reading frame resulting in a stop codon 15 bp after the NotI site. A +1 bp insertion restores the bla ORF so that b-lactamase protein. is produced with a consequent gain of Ampicillin resistance.

[0171] The vector pMAL9.1 was constructed by cloning the lamB gene into the multiple cloning site of pEH1. Subsequently, a sequence was inserted in lamB after amino acid 154, containing the restriction sites FseI, SmaI and NotI. The reading frame for this insertion was chosen in a way that transfer of frame-selected DNA fragments excised by digestion with FseI and NotI from plasmids pML4.1 or pMAL4.31 to plasmid pMAL9.1 will yield a continuous reading frame of lamB and the respective insert.

[0172] The vector pHIE11 was constructed by cloning the fhuA gene into the multiple cloning site of pEH1. Thereafter, a sequence was inserted in fhuA after amino acid 405, containing the restriction site FseI, XbaI and NotI. The reading frame for this insertion was chosen in a way that transfer of frame-selected DNA fragments excised by digestion with FseI and NotI from plasmids pMAL4.1 or pMAL4.31 to plasmid pHIE11 will yield a continuous reading frame of fhuA and the respective insert.

[0173] Cloning and evaluation of the library for frame selection. Genomic S. aureus DNA fragments were ligated into the SmaI site of either the vector pMAL4.1 or pMAL4.31. Recombinant DNA was electroporated into DH1OB electrocompetent E. coli cells (GIBCO BRL) and transformants plated on LB-agar supplemented with Kanamycin (50 μg/ml) and Ampicillin (50 μg/ml). Plates were incubated over night at 37° C. and colonies collected for large scale DNA extraction. A representative plate was stored and saved for collecting colonies for colony PCR analysis and large-scale sequencing. A simple colony PCR assay was used to initially determine the rough fragment size distribution as well as insertion efficiency. From sequencing data the precise fragment size was evaluated, junction intactness at the insertion site as well as the frame selection accuracy (3n+1 rule).

[0174] Cloning and evaluation of the library for bacterial surface display. Genomic DNA fragments were excised from the pMAL4.1 or pMAL4.31 vector, containing the S. aureus library with the restriction enzymes FseI and NotI. The entire population of fragments was then transferred into plasmids pMAL9.1 (LamB) or pHIE11 (FhuA) which have been digested with FseI and NotI. Using these two restriction enzymes, which recognise an 8 bp GC rich sequence, the reading frame that was selected in the pMAL4.1 or pMAL4.31 vector is maintained in each of the platform vectors. The plasmid library was then transformed into E. coli DH5a cells by electroporation. Cells were plated onto large LB-agar plates supplemented with 50 μg/ml Kanamycin and grown over night at 37° C. at a density yielding clearly visible single colonies. Cells were then scraped off the surface of these plates, washed with fresh LB medium and stored in aliquots for library screening at −80° C.

[0175] Results

[0176] Libraries for frame selection. Two libraries (LSA50/6 and LSA250/1) were generated in the pMAL4.1 vector with sizes of approximately 50 and 250 bp, respectively. For both libraries a total number of clones after frame selection of 1-2×10⁶ was received using approximately 1 μg of pMAL4.1 plasmid DNA and 50 ng of fragmented genomic S. aureus DNA. To assess the randomness of the LSA50/6 library, 672 randomly chosen clones were sequenced. The bioinformatic analysis showed that of these clones none was present more than once. Furthermore, it was shown that 90% of the clones fell in the size range of 19 to 70 bp with an average size of 25 bp (FIG. 2). All 672 sequences followed the 3n+1 rule, showing that all clones were properly frame selected.

[0177] Bacterial surface display libraries. The display of peptides on the surface of E. coli required the transfer of the inserts from the LSA50/6 library from the frame selection vector pMAL4.1 to the display plasmids pMAL9.1 (LamB) or pHIE11 (FhuA). Genomic DNA fragments were excised by FseI and NotI restriction and ligation of 5 ng inserts with 0.1 μg plasmid DNA resulted in 2-5×10⁶ clones. The clones were scraped off the LB plates and frozen without further amplification.

### Example 3

### Identification of Highly Immunogenic Peptide Sequences from S. aureus Using Bacterial Surface Displayed Genomic Libraries and Human Serum

[0178] Experimental Procedures

[0179] MACS screening. Approximately 2.5×10⁸ cells from a given library were grown in 5 ml LB-medium supplemented with 50 μg/ml Kanamycin for 2 h at 37° C. Expression was induced by the addition of 1 mm IPTG for 30 min. Cells were washed twice with fresh LB medium and approximately 2×10⁷ cells re-suspended in 100 μl LB medium and transferred to an Eppendorf tube.

[0180] 10 μg of biotinylated, human serum was added to the cells and the suspension incubated over night at 4° C. with gentle shaking. 900 μl of LB medium was added, the suspension mixed and subsequently centrifuged for 10 min at 6000 rpm at 4° C. Cells were washed once with 1 ml LB and then re-suspended in 100 μl LB medium. 10 μl of MACS microbeads coupled to streptavidin (Miltenyi Biotech, Germany) were added and the incubation continued for 20 min at 4° C. Thereafter 900 μl of LB medium was added and the MACS microbead cell suspension was loaded onto the equilibrated MS column (Miltenyi Biotech, Germany) which was fixed to the magnet. (The MS columns were equilibrated by washing once with 1 ml 70% EtOH and twice with 2 ml LB medium.)

[0181] The column was then washed three times with 3 ml LB medium. The elution was performed by removing the magnet and washing with 2 ml LB medium. After washing the column with 3 ml LB medium, the 2 ml eluate was loaded a second time on the same column and the washing and elution process repeated. The loading, washing and elution process was performed a third time, resulting in a final eluate of 2 ml.

[0182] A second round of screening was performed as follows. The cells from the final eluate were collected by centrifugation and resuspended in 1 ml LB medium supplemented with 50 μg/ml Kanamycin. The culture was incubated at 37° C. for 90 min and then induced with 1 mM IPTG for 30 min. Cells were subsequently collected, washed once with 1 ml LB medium and suspended in 10 μl LB medium. Since the volume was reduced, 1 μg of human, biotinylated serum was added and the suspension incubated over night at 4° C. with gentle shaking. All further steps were exactly the same as in the first selection round. Cells selected after two rounds of selection were plated onto LB-agar plates supplemented with 50 μg/ml Kanamycin and grown over night at 37° C.

[0183] Evaluation of selected clones by sequencing and Western blot analysis. Selected clones were grown over night at 37° C. in 3 ml LB medium supplemented with 50 μg/ml Kanamycin to prepare plasmid DNA using standard procedures. Sequencing was performed at MWG (Germany) or in a collaboration with TIGR (U.S.A.).

[0184] For Western blot analysis approximately 10 to 20 μg of total cellular protein was separated by 10% SDS-PAGE and blotted onto HybondC membrane (Amersham Pharmacia Biotech, England). The LamB or FhuA fusion proteins were detected using human serum as the primary antibody at a dilution of 1:5000 and anti human IgG antibodies coupled to HRP at a dilution of 1:5000 as secondary antibodies. Detection was performed using the ECL detection kit (Amersham Pharmacia Biotech, England). Alternatively, rabbit anti FhuA or mouse anti LamB antibodies were used as primary antibodies in combination with the respective secondary antibodies coupled to HRP for the detection of the fusion proteins.

[0185] Results

[0186] Screening of bacterial surface display libraries by magnetic activated cell sorting (MACS) using biotinylated human serum. The libraries LSA50/6 in pMAL9.1 and LSA250/1 in pHIE11 were screened with a pool of biotinylated, human patient sera (see Example 1) Preparation of antibodies from human serum). The selection procedure was performed as described under Experimental procedures. As a control, pooled human sera from infants that have most likely not been infected with S. aureus was used. Under the described conditions between 10 and 50 fold more cells with the patient compared to the infant serum were routinely selected (FIG. 3). To evaluate the performance of the screen, approximately 100 selected clones were picked randomly and subjected to Western blot analysis with the same pooled patient serum. This analysis revealed that 30 to 50% of the selected clones showed reactivity with antibodies present in patient serum whereas the control strain expressing LamB or FhuA without a S. aureus specific insert did not react with the same serum. Colony PCR analysis showed that all selected clones contained an insert in the expected size range.

[0187] Subsequent sequencing of a larger number of randomly picked clones (500 to 800 per screen) led to the identification of the gene and the corresponding peptide or protein sequence that was specifically recognized by the human patient serum used for screening. The frequency with which a specific clone is selected reflects at least in part the abundance and/or affinity of the specific antibodies in the serum used for selection and recognizing the epitope presented by this clone. In that regard it is striking that some clones (ORF2264, ORF1951, ORF0222, lipase and IsaA) were picked up to 90 times, indicating their highly imunogenic property. All clones that are presented in Table 2 have been verified by Western blot analysis using whole cellular extracts from single clones to show the indicated reactivity with the pool of human serum used in the screen.

[0188] It is further worth noticing that most of the genes identified by the bacterial surface display screen encode proteins that are either attached to the surface of S. aureus and/or are secreted. This is in accordance with the expected role of surface attached or secreted proteins in virulence of S. aureus.

[0189] Assessment of reactivity of highly immunogenic peptide sequences with different human sera. 10 to 30 different human patient sera were subsequently used to evaluate the presence of antibodies against the selected immunogenic peptide sequences that have been discovered in the screen according to the present invention. To eliminate possible cross-reactivity with proteins expressed by E. coli, all sera were pre-adsorbed with a total cellular lysate of E. coli DHa cells expressing FhuA protein.

[0190] This analysis is summarized in Table 2 and as an example shown in FIG. 4 and is indicative of the validity of the present screen. It further shows that already short selected epitopes can give rise to the production of antibodies in a large number of patients (ORF1618, ORF1632, IsaA, Empbp, Protein A). Those peptide sequences that are not recognized by a larger set of patient sera may still be part of an highly immunogenic protein, but the recombinant protein itself may be tested for that purpose for each single case.

### Example 4

### Identification of Highly Immunogenic Peptide Sequences from Genomic Fragments from S. aureus Using Ribososme Display and Human Serum

[0191] Experimental Procedures

[0192] Ribosome display screening: 2.4 ng of the genomic library from S. aureus LSA250/1 in pMAL4.1 (described above) was PCR amplified with oligos ICC277 and ICC202 in order to be used for ribosome display. Oligos ICC277 (CGAATAATACGACTCACTATAGGGAGACCACAACGGTTTCCCACTAGTAATAATTTTGTTTAAC TTTAAGAAGGAGATATATCCATGCAaCCTTGGCCGGCCTCCC) and ICC202 (GGCCCACCCGTGAAGGTGAGCCGGCGTAAGATGCTTTTCTGTGACTGG) hybridize 5′ and 3′ of the FseI-NotI insertion site of plasmid pMAL4.1, respectively. ICC277 introduces a T7 phage RNA polymerase promoter, a palindromic sequence resulting in a stem-loop structure on the RNA level, a ribosome binding site (RBS) and the translation start of gene 10 of the T7 phage including the ATG start codon. Oligo ICC202 hybridizes at nucleotide position 668 of the β-lactamase open reading frame and also introduces a stem-loop structure at the 3′ end of the resulting RNA. PCR was performed with the High fidelity PCR kit (Roche Diagnostic) for 25 cycles at 50° C. hybridization temperature and otherwise standard conditions.

[0193] The resulting PCR library was used in 5 consecutive rounds of selection and amplification by ribosome display similar as described previously (Hanes et al., 1997) but with modifications as described below.

[0194] One round of ribosome display contained the following steps: In vitro transcription of 2 μg PCR product with the RiboMax kit (Prxmega) resulted in ca. 50 μg A. In vitro translation was performed for 9 minutes at 37° C. in 22 μl volume with 4.4 μl Premix Z (250 mM TRIS-acetate pH 7.5, 1.75 mM of each amino acid, 10 mm ATP, 2.5 mM GTP, 5 mM cAMP, 150 mM acetylphosphate, 2.5 mg/ml E. coli tRNA, 0.1 mg/ml folinic acid, 7.5% PEG 8000, 200 mM potassium glutamate, 13.8 mM Mg(Ac)2, 8 μl S30 extract (x mg/ml) and about 2 μg in vitro transcribed RNA from the pool. S30 extract was prepared as described (Chen et al, 1983). Next, the sample was transferred to an ice-cold tube containing 35.2 μl 10% milk-WBT (TRIS-acetate pH 7.5, 150 mM NaCl, 50 mM Mg(Ac)2, 0.1% Tween-20, 10% milk powder) and 52.8 μl WBTH (as before plus 2.5 mg/ml heparin). Subsequently, immuno precipitation was performed by addition of 10 μg purified IgGs, incubation for 90 minutes on ice, followed by addition of 30 μl MAGmol Protein G beads (Miltenyi Biotec, 90 minutes on ice). The sample was applied to a pre-equilibrated p column (Miltenyi Biotec) and washed 5 times with ice-cold WBT buffer. Next 20 μl EB20 elution buffer (50 mM TRIS-acetate, 150 mM NaCl, 20 mM EDTA, 50 μg/ml S. cerevisiae RNA) was applied to the column, incubated for 5 minutes at 4° C. Elution was completed by adding 2×50 μl EB20. The mRNA from the elution sample was purified with the High pure RNA isolation kit (Roche Diagnostics). Subsequent reverse transcription was performed with Superscript II reverse transcriptase kit (Roche Diagnostics) according to the instruction of the manufacturer with 60 pmol oligo ICC202 for 1 hour at 50° C. in 50 μl volume. 5 μl of this mix was used for the following PCR reaction with primers ICC202 and ICC277 as described above.

[0195] Three rounds of ribosome display were performed and the resulting selected PCR pool subsequently cloned into plasmid pHIE11 (described above) by cleavage with restriction endonucleases NotI and FseI.

[0196] Evaluation of selected clones by sequencing and peptide-ELISA analysis: Selected clones were grown over night at 37° C. in 3 ml LB medium supplemented with 50 μg/ml Kanamycin to prepare plasmid DNA using standard procedures. Sequencing was performed at MWG (Germany) or at the Institute of Genomic Research (TIGR; Rockville, Md., U.S.A.). Peptides corresponding to the inserts were synthesized and coated in 10 mM NaHCO₃ pH 9.3 at a concentration of 10 μg/ml (50 μl) onto 96-well microtiter plates (Nunc). After blocking with 1% BSA in PBS at 37° C., 1:200 and 1:1000 dilutions of the indicated sera were diluted in 1% BSA/PBS and applied to the wells. After washing with PBS/0.1% Tween-20, biotin-labeled anti-human IgG secondary antibodies (SBA) were added and these were detected by subsequent adding horseradish-peroxidase-coupled streptavidin according to standard procedures.

[0197] Results

[0198] The 250-bp genomic library (LSA250/1) as described above was used for screening. Purified IgGs from uninfected adults but with high titer against S. aureus as described above were used for selection of antigenic peptides.

[0199] Three rounds of ribosome display selection and amplificaton were performed according to Experimental procedures; finished by cloning and sequencing the resulting PCR pool.

[0200] Sequence analyses of a large number of randomly picked clones (700) led to the identification of the gene and the corresponding peptide or protein sequence that was specifically recognized by the high titer serum used for screening. The frequency with which aspecific clone was selected reflects at least in part the abundance and/or affinity of the specific antibodies in the serum used for selection and recognizing the epitope presented by this clone. Remarkably, some clones (ORFs) were picked up to 50 times, indicating their highly immunogenic property. Table 2 shows the ORF name, the Seq.ID No. and the number of times it was identified by the inventive screen.

[0201] For a number of immuno-selected ORFS peptides corresponding to the identified immunogenic region were synthesized and tested in peptide-ELISA for their reactivity towards the sera pool they were identified with and also a number of additional sera from patients-who suffered from an infection by S. aureus. The two examples in the graphs in FIG. 5 show the values of peptides from aureolysin and Pls. They are not only hyperimmune reactive against the high titer sera pool but also towards a number of individual patient's sera. All synthesized peptides corresponding to selected immunogenic regions showed reactivity towards the high titer sera pool and Table 2 summarizes the number of times the peptides were reactive towards individual patients sera, similar as described above.

[0202] In addition, it is striking that for those ORFs that were also identified by bacterial surface display described above), very often the actual immunogenic region within the ORF was identical or overlapping with the one identified by ribosome display. This comparison can be seen in Table 2.

### Example 5

### Identification of Highly Immunogenic antigens from S. aureus Using Serological Proteome Analysis

[0203] Experimental Procedures

[0204] Surface protein preparations from S. aureus containing highly immunogenic antigens. S. aureus strains COL (Shafer and Iandolo, 1979) and, agr- (Recsei et al., 1986) were stored as glycerol stocks at −80° C. or on BHI (DIFCO) plates at 4° C. Single clones were used for inoculation of overnight cultures in either BHI (“standard conditions”) or RPMI 1640 (GibcoBRL), last one depleted from iron (“stress conditions” a) by treating o/n with iminodiacetic acid (Sigma). Fresh medium was inoculated 1:100 the next day and bacteria were grown to O.D. ₆₀₀ between 0.3 and 0.7. Bacteria were harvested by centrifugation and washed with ice-cold PBS. Surface proteins were prepared by lysostaphin treatment under isotonic conditions (Lim et al. 1998). Briefly; ˜3×10⁹ bacteria (according to O.D.₆₀₀=1 are about 5×10⁷ bacteria) were resuspended in 1 ml digestion buffer containing 35% raffinose (Aldrich Chemical Company), protease inhibitors (Roche) and 5 units lysostaphin (Sigma). After incubation at 37° C. for 30 min, protoplasts were carefully sedimented by low-speed centrifugation. This treatment releases surface proteins covalently linked to the pentaglycine bridge of the peptidoglycan cell wall to the supernatant (in Crossley, 1997). Cell surface proteins were either precipitated with methanol/chlorophorm (Wessel, 1984) or concentrated in centrifugal filter-tubes (Millipore). Protein samples were frozen and stored at −80° C. or dissolved in sample buffer and used for isoelectric focusing (IEF) immediately (Pasquali et al. 1997).

[0205] Serological proteome analysis of surface protein preparations from S. aureus. Samples were obtained from a) S. aureus/agr grown under “stress conditions”, b) S. aureus/COL grown under “standard conditions” and c) S. aureus/COL “stress conditions”. Loading onto 17 cm-strips containing immobilized pH gradients (pH 4-7, BioRad) was done using the “in-gel-reswelling procedure” (Pasquali et al., 1997). The gels for blotting were loaded with 100-800 μg protein, the preparative gels with 400-1,000 μg protein. Isoelectric focusing and SDS-PAGE (9-16% gradient gels) were performed as described (Pasquali et al., 1997). For Western blotting, proteins were transferred onto PVDF-membranes (BioRad) by semi-dry blotting. Transfer-efficiency was checked by amido-black staining. After blocking (PBS/0.1% Tween 20/10% dry milk, 4° C. for 16 h), blots were incubated for two hours with serum (1:2,500-1:100,000 in blocking solution, see Table 3). After washing, specific binding of serum IgG was visualized with a goat-anti-human-IgG/peroxidase conjugate (1:25,000, Southern Biotech) as secondary antibody and development with a chemiluminescence substrate (ECLE, Amersham). A representative result is shown in FIG. 6. Membranes were stripped by treatment with 2% β-ME/Laemmli buffer for 30 min at 50-65° C., immediately re-probed with a different serum, and developed as described above. This procedure was repeated up to five times. Signals showing up with patient and/or healthy donor control sera but not with the infant pool, were matched to the Coomassie (BioRad) stained preparative gels (example shown in FIG. 7). The results of these serological proteome analyses of surface protein preparations from S. aureus are summarized in Table 3.

[0206] Sequencing of protein spots by peptide-fingerprint MALDI-TOF-MS and tandem MS/MS. Gel pieces were washed alternately three times with 10 μl digestion buffer (10 mM NH₄HCO₃/CAN, 1:1). Afterwards the gel pieces were shrunken with 10 μl ACN and reswollen with 2 μl protease solution (0.05 μg/μl trypsin, Promega, Madison, USA). Digestion was performed for 10-12 h at 37° C. For MALDI-TOF-MS peptides were extracted from the gel pieces with 10 μl digestion buffer. The supernatant was concentrated with ZipTipr (Millipore, Bedford, USA), the peptides were eluted onto the MALDI target with 0.5 μl extraction buffer (0.1% TFA/CAN, 1:1) and 0.5 μl matrix solution (HCCA in ACN/0.1% TFA, 1:1) was added. MALDI-TOF-MS was done using a REFLEX III (Bruker Daltonik, Bremen, Germany) equipped with a SCOUT384 ion source. The acceleration voltage was set to 25 kV, and the reflection voltage to 28.7 kV. The mass range was set from 700 Da to 4000 Da. Data acquisition was done on a SUN Ultra using XACQ software, version 4.0. Post-analysis data processing was done using XMASS software, version 4.02 (Bruker Daltonik, Bremen, Germany). The results are summarized in tables 3 and 4.

### Example 6

### Characterisation of Highly Immiogenic Proteins from S. aureus

[0207] The antigens identified by the different screening methods with the IgG and IgA preparations form pre-selected sera are. further characterized, by the following ways:
[0208] 1. The proteins are purified, most preferably as recombinant proteins expressed in E. coli or in a Gram+ expression system or in an in vitro translation system, and evaluated for antigenicity by a series of human sera. The proteins are modified based on bioinformatic analysis: N-terminal sequences representing the signal peptide are removed, C-terminal regions downstream of the cell wall anchor are also removed, and extra amino acids as tags are introduced for the ease of purification (such as Strep-tagII, His-tag, etc.) A large number of sera is then used in ELISA assays to assess the fraction of human sera containing specific antibodies against the given protein (see FIG. 9 as an example). one of the selected antigens is a 895 aa long protein, what was called LPXTGV (see Tables 2 and 4), since. it contains the Gram+ cell wall anchor sequence LPXTG. This signature has been shown to serve as cleavage site for sortase, a trans-peptidase which covalently links LPXTG motif containing proteins to the peptidoglycan cell wall. LPXTGV is also equipped with a typical signal peptide (FIG. 8). ELISA data using this protein as a Strep-tagged recombinant protein demonstrate that this protein is highly immunogenic (high titers relative to other recombinant proteins) in a high percentage of sera (FIG. 9). Importantly, patients with acute S. aureus infection produce significantly more of these anti-LPXTGV antibodies, than healthy normals, suggesting that the protein is expressed during in vivo infection. The overall ELISA titers of the individual antigenic proteins are compared, and the ones inducing the highest antibody levels (highly immunogenic) in most individuals (protein is expressed by most strains in vivo) are favored. Since the antigen specificity and quality (class, subtype, functional, nonfunctional) of the antibodies against S. aureus produced in individual patients can vary depending on the site of infection, accompanying chronic diseases (e.g. diabetes) and chronic conditions (e.g. intravascular device), and the individuals' immune response,special attention was paid to the differences detected among the different patient groups, since medical records belonging to each sera were available. In addition, each patient serum is accompanied by the pathogenic strain isolated from the patient at the time of serum sampling.
[0209] 2. Specific antibodies are purified for functional characterization. The purity and the integrity of the recombinant proteins are checked (e.g. detecting the N-terminal Strep-tag in Western blot analysis in comparison to silver staining in SDS-PAGE). The antigens are immobilized through the tags to create an affinity matrix, and used for the purification of specific antibodies from highly reactive sera. Using as an example strep-tagged LPXTGV as the capture antigen, 20 μg of antibody from 125 mg of IgG were purified. Based on the ELISA data a pure preparation was received, not having e.g. anti-LTA and anti-peptidoglycan (both dominant with unfractionated IgG) activity. The antibodies are then used to test cell surface localization by FACS and fluorescent microscopy (FIG. 10).
[0210] 3. Gene occurrence in clinical isolates An ideal vaccine antigen would be an antigen that is present in all, or the vast majority of, strains of the target organism to which the vaccine is directed. In order to establish whether the genes encoding the identified Staphylococcus aureus antigens occur ubiquitously in S. aureus strains, PCR was performed on a series of independent S. aureus isolates with primers specific for the gene of interest. S. aureus isolates were obtained from patients with various S. aureus infections. In addition several nasal isolates from healthy carriers and several lab strains were also collected and analyzed. The strains were typed according to restriction fragment length polymorphism (RFLP) of the spa and coa genes (Goh et al. 1992, Frénay et al., 1994, vanden Bergh et al. 1999). From these results 30 different strains were identified—24 patient isolates, 3 nasal isolates and 3 lab strains. To establish the gene distribution of selected antigens, the genomic DNA of these 30 strains was subjected to PCR with gene specific primers that flank the selected epitope (ORF1361: Seq.ID No. 187 and 188; ORF2268: Seq.ID No. 193 and 194; ORF1951: Seq.ID No. 195 and 196; ORF1632: Seq.ID No. 181 and 182; ORF0766: Seq.ID No. 183 and 184; ORF0576: Seq.ID No. 185 and 186; ORF0222: Seq.ID No. 189 and 190; ORF0360: Seq.ID No. 191 and 192). The PCR products were analyzed by gel electrophoresis to identify a product of the correct predicted size. ORFs 1361, 2268, 1951, 1632, 0766 and 0222 are present in 100% of strains tested and ORF0576 in 97%. However ORF0360 occurred in only 71% of the strains. Thus ORFs 1361, 2268, 1951, 1632, 0766, 0576 and 0222 each have the required ubiquitous presence among S. aureus isolates.

[0211] These antigens (or antigenic fragments thereof, especially the fragments identified) are especially preferred for use in a vaccination project against S. aureus.
[0212] 4. Identification of highly promiscuous HLA-class II helper epitopes within the ORFs of selected antigens The ORFs corresponding to the antigens identified on the basis of recognition by antibodies in human sera, most likely also contain linear T-cell epitopes. Especially the surprising finding in the course of the invention that even healthy uninfected, non-colonized individuals show extremely high antibody titers (>100,000 for some antigens, see Example 5) which are stable for >1 year (see Example 1), suggests the existence of T-cell dependent memory most probably mediated by CD4+ helper-T-cells. The molecular definition of the corresponding HLA class II helper-epitopes is usefull for the design of synthetic anti-staphylococcal vaccines, which can induce immunological memory. In this scenario the helper-epitopes derived from the staphylococcal antigens provide “cognate help” to the B-cell response against these antigens or fragments thereof. Moreover it is possible to use these helper-epitopes to induce memory to T-independent antigens like for instance carbohydrates (conjugate vaccines). On the other hand, intracellular occurring staphylococci can beeliminated by CD8+ cytotoxic T-cells, which recognize HLA class I restricted epitopes.

[0213] T-cell epitopes can be predicted by various public domain algorithms: http://bimas.dcrt.nih.aov/molbio/hla bind/ (Parker et al. 1994), http://134.2.96.221/scripts/MHCServer.dll/home.htm (Rammensee at al. 1999), http://mypage.ihost.com/usinet.hamme76/ (Sturniolo et al. 1999). The latter prediction algorithm offers the possibility to identify promiscuous helper-epitopes, i.e. peptides that bind to several HLA class II molecules. In order to identify highly promiscuous helper-epitopes within staphylococcal antigens the ORFs corresponding to Seq ID 64 (IsaA), Seq ID 114 (POV2), Seq ID 89 (QRF0222), Seq ID 70 (LPXTGIV), Seq ID 56 (LPXTGV), Seq ID 142 (LPXTGVI), Seq ID 81 (ORF3200), Seq ID 74 (ORF1951), Seq ID 94 (Empbp), Seq ID 83 (autolysin) and Seq ID 58 (ORF2498) were analyzed using the TEPITOPE package http://mypage.ihost.com/usinet.hamme76/ (Sturniolo et al. 1999). The analysis was done for 25 prevalent DR-alleles and peptides were selected if they were predicted to be a) strong binders (1% threshold) for at least 10/25 alleles or b) intermediate (3% threshold) binders for at least 17/25 alleles.

[0214] The following peptides containing one or several promiscuous helper-epitopes were selected (and are claimed):

| | |
|---|---|
| Seq ID 56: | pos. 6-40, 583-598, 620-646, 871-896 |
| Seq ID 58: | no peptide fulfills selection criteria |
| Seq ID 64: | no peptide fulfills selection criteria |
| Seq ID 70: | pos. 24-53 |
| Seq ID 74: | pos. 240-260 |
| Seq ID 81: | pos. 1660-1682, 1746-1790 |
| Seq ID 83: | pos. 1-29, 680-709, 878-902 |
| Seq ID 89: | pos. 96-136 |
| Seq ID 94: | pos. 1-29, 226-269, 275-326 |
| Seq ID 114: | pos. 23-47, 107-156 |
| Seq ID 142: | pos. 24-53 |

[0215] The corresponding peptides or fragments thereof (for instance overlapping 15-mers) can be synthesized and tested for their ability to bind to various HLA molecules in vitro. Their immunogenicity can be tested by assessing the peptide (antigen)-driven proliferation (BrdU or 3H-thymidine incorporation) or the secretion of cytokines (ELIspot, intracellular cytokine staining) of T-cells in vitro (Mayer et al. 1996, Schmittel et al. 2000, Sester et al. 2000). In this regard it will be interesting to determine quantitative and qualitative differences in the T-cell response to the staphylococcal antigens or the selected promiscuous peptides or fragments thereof in populations of patients with different staphylococcal infections, or colonization versus healthy individuals neither recently infected nor colonized. Moreover, a correlation between the antibody titers and the quantity and quality of the T-cell response observed in these populations is expected. Alternatively, immunogenicity of the predicted peptides can be tested in HLA-transgenic mice (Sonderstrup et al. 1999).

[0216] Similar approaches can be taken for the identification of HLA class I restricted epitopes within staphylococcal antigens.

[0217] Synthetic Peptides Representing One or More Promiscuous T Helper Epitopes from S.aureus

[0218] Partially overlapping peptides spanning the indicated regions of Seq ID 56 (LPXTGV), Seq ID 70 (LPXTGIV), Seq ID 74 (ORF1hom1), Seq ID 81 (EM_BP), Seq ID 83 (Autolysin), Seq ID 89 (ORF1hom2), Seq ID 94 (EMPBP), Seq ID 114 (POV2) and Seq ID 142 (LPXTGVI) were synthesized. Sequences of the individual peptides are given in Table 5. All peptides were synthesized using Fmoc chemistry, HPLC purified and analyzed by mass spectrometry. Lyophilized peptides were dissolved in DMSO and stored at −20° C. at a concentration of 5-10 mM.

[0219] Binding of Synthetic Peptides Representing Promiscuous T Helper Epitopes to HLA Molecules In Vitro

[0220] Binding of peptides to HLA molecules on the surface of antigen-presenting cells is a prerequisite for activation of T cells. Binding was assessed in vitro by two independent biochemical assays using recombinant soluble versions of HLA class II molecules. One assay measures the concentration dependent competitive replacement of a labeled reference peptide by the test peptides. The second assay is based on the formation of SDS-stable complexes upon binding of high- and intermediate affinity ligands. A summary of the results obtained by the two assays is given in Table 5.

[0221] Soluble HLA molecules (DRA1*0101/DRB1*0101 and DRA1*0101/DRB1*0401) were expressed in SC-2 cells and purified as described in Aichinger et al., 1997. For the competition assay (Hammer et al. 1995) HLA molecules were applied between 50 and 200 ng/well. For DRB1*0101 biotinilated indicator peptide HA (PKYVKQNTLKLAT, Valli et al. 1993) was used at 0.008 μM. For DRB1*0401 biotinilated indicator peptide UD4 (YPKFVKQNTLKAA, Valli et al. 1993) was used between 0.03 and 0.06 μM. Test peptides were used in serial dilutions from 0.02 nM to 200 μM. Molecules, indicator and test peptides were incubated overnight at 37° C., pH 7. HLA:peptide complexes obtained after incubation with serial dilutions of test and reference peptides (the known high-affinity binders HA and UD4 were used as positive control) were captured in ELISA plates coated with antibody L243, which is known to recognize a conformational epitope formed only by correctly associated heterodimers. Incorporated biotin was measured by standard colorimetric detection using a streptavidin-alkaline phosphatase conjugate (Dako) with NBT/BCIP tablets (Sigma) as substrate and automated OD reading on a Victor reader (Wallac).

[0222] T Cell Response Against Promiscuous T Helper Epitopes Assessed by IFNg ELIspot Assay

[0223] Upon antigenic stimulation T cells start to proliferate and to secrete cytokines such as interferon gamma (IFNg). Human T cells specifically recognizing epitopes within S.aureus antigens were detected by IFNg-ELIspot (Schmittel et al. 2000). PBMCs from healthy individuals with a strong anti-S.aureus IgG response were isolated from 50-100 ml of venous blood by ficoll density gradient centrifugation and used after freezing and thawing. Cells were seeded at 200,000/well in 96-well plates. Peptides were added as mixtures corresponding to individual antigens, in both cases at 10 μg/ml each. Concanavalin A (Amersham) and PPD (tuberculin purified protein derivate, Statens Serum Institute) served as assay positive controls, assay medium without any peptide as negative control. After overnight incubation in Multi Screen 96-well filtration plates (Millipore) coated with the anti-human IFNg monoclonal antibody B140 (Bender -Med Systems) the ELIspot was developed using the biotinylated anti-human IFNg monoclonal antibody B308-BT2 (Bender Med Systems), Streptavidin-alkaline phosphatase (DAKO) and BCIP/NBT alkaline phosphatase substrate (SIGMA). Spots were counted using an automatic plate reader (Bioreader 2000, BIO-SYS). Spots counted in wells with cells stimulated with assay medium only (negative control, generally below 10 spots/100,000 cells) were regarded as background and subtracted from spot numbers counted in wells with peptides.

TABLE 5
Promiscuous T helper epitopes contained in S. aureus antigens

| | | |
|---|---|---|
| Amino acid sequences within S. aureus antigens containing | | IFNg |
| highly promiscuous T helper epitopes | binding ¹⁾ | ELIspot ²⁾ |

| | | | |
|---|---|---|---|
| Seq ID 56 | (LPXTGV): pos. 6-40 | | |
| p6-28 | >PKLRSFYSIRKSTLGVASVIVST// | + | 44; 80; 8; |
| p24-40 | >VIVSTLFLISQHQAQA// | − | 95; 112 |
| Seq ID 56 | (LPXTGV): pos. 620-646 | | |
| p620-646 | >FPYIPDKAVYNAIVKVVVANIGYEGQ// | + | |
| Seq ID 56 | (LPXTGV): pos. 871-896 | | |
| p871-896 | >QSWWGLYALLGMLALFIPKFRKESK// | − | |
| Seq ID 70 | (LPXTGIV): pos. 24-53 | | |
| p24-53 | >YSIRKFTVGTASILIGSLMYLGTQQEAEA// | nd | 34; 14; 0; |
| | | | 57; 16 |
| Seq ID 74 | (ORF1hom1): pos. 240-260 | | |
| p240-260 | >MNYGYGPGVVTSRTISASQA// | + | 47; 50; 0; |
| | | | 85; 92 |
| Seq ID 81 | (EM_BP): pos. 1660-1682 | | |
| p1660-1682 | >NEIVLETIRDINNAHTLQQVEA// | nd | 2; 14; 5; |
| | | | 77; 26 |
| Seq ID 81 | (EM_BP): pos. 1746-1790 | | |
| p1746-1773 | >LHMRHFSNNFGNVIKNAIGVVGISGLLA// | nd | |
| p1753-1779 | >NNFGNVIKNAIGVVGISGLLASFWFFI// | nd | |
| p1777-1789 | >FFIAKRRRKEDEE/ | nd | |
| Seq ID 83 | (Autolysin) pos. 1-29 | | |
| p1-29: | >MAKKFNYKLPSMVALTLVGSAVTAHQVQA// | nd | 6; 35; 7; |
| | | | 60; 49 |
| Seq ID 83 | (Autolysin) pos. 878-902 | | |
| p878-902: | >NGLSMVPWGTKNQVILTGNNIAQG/ | nd | |
| Seq ID 89 | (ORF1hom2): pos. 96-136 | | |
| p96-121 | >GESLNIIASRYGVSVDQLMAANNLRG// | − | 0; 35; 0; |
| p117-136 | >NNLRGYLIMPNQTLQIPNG// | − | 29; 104 |
| Seq ID 94 | (EMPBP): pos. 1-29 | | |
| p4-29: | >KLLVLTMSTLFATQIMNSNHAKASV// | + | |
| Seq ID 94 | (EMPBP): pos. 226-269 | | |
| p226-251 | >IKINHFCVVPQINSFKVIPPYGHNS// | − | 26; 28; 1 |
| p254-270 | >MHVPSFQNNTTATHQN// | + | 6; 43; 97 |
| Seq ID 94 | (EMPBP): pos. 275-326 | | |
| p275-299 | >YDYKYFYSYKVVKGVKKYFSFSQS// | + | |
| p284-305 | >YKVVKGVKKYFSFSQSNGYKIG// | + | |
| p306-326 | >PSLNIKNVNYQYAVPSYSPT// | + | |
| Seq ID 114 | (POV2): pos. 23-47 | | |
| p23-47 | >AGGIFYNQTNQQLLVLCDGMGGHK// | − | 49; 20; 4; |
| | | | 77; 25 |
| Seq ID 114 | (POV2): pos. 107-156 | | |
| p107-124 | >ALVFEKSVVIANVGDSRA/ | − | |
| p126-146 | >RAYVINSRQIEQITSDHSFVN// | nd | |
| p142-158 | >SFVNHLVLTGQITPEE// | nd | |
| Seq ID 142 | (LPXTGVI): pos. 1-42 | | |
| p6-30 | >KEFKSFYSIRKSSLGVASVAISTL// | + + | 0; 41; 20; |
| p18-42 | >SSLGVASVAISTLLLLMSNGEAQA// | nd | 88; 109 |
| Seq ID 142 | (LPXTGVI): pos. 209-244 | | |
| p209-233 | >IKLVSYDTVKDYAYIRFSVSNGTKA// | + | |
| p218-244 | >KDYAYIRFSVSNGTKAVKIVSSTHFNN// | + | |
| Seq ID 142 | (LPXTGVI): pos. 395-428 | | |
| p395-418 | >FMVEGQRVRTISTYAINNTRCTIF// | − | |
| p416-428 | >TIFRYVEGKSLYE// | − | |
| Seq ID 142 | (LPXTGVI): pos. 623-647 | | |
| p623-647 | >MTLPLMALLALSSIVAFVLPRKRKN // | − | |

¹⁾ binding to soluble DRA1*0101/DRB1*0401 molecules was determined using a competition assay (+, + +: binding, −: no competition up to 200 μM test peptide; nd: not done)
²⁾ results from 5 healthy individuals with strong anti-S. aureus IgG response. Data are represented as spots/200.000 cells (background values are subtracted

[0224] 5. Antigens may be injected into mice—and the antibodies against these proteins can be measured.
[0225] 6. Protective capacity of the antibodies induced by the antigens through vaccination can be assessed in animal models.

[0226] Both 5. and 6. are methods well available to the skilled man in the art.

### Example 7

### Applications

[0227] A) An effective vaccine offers great potential for patients facing elective surgery in general, and those receiving endovascular devices, in particular. Patients suffering from chronic diseases with decreased immune responses or undergoing continuous ambulatory peritoneal dialysis are likely to benefit from a vaccine with S. aureus by immunogenic serum-reactive antigens according to the present invention. Identification of the relevant antigens will help to generate effective passive immunization (humanized monoclonal antibody therapy), which can replace human immunoglobulin administration with all its dangerous side-effects. Therefore an effective vaccine offers great potential for patients facing elective surgery in general, and those receiving endovascular devices, in particular.

[0228] S. aureus can cause many different diseases.
[0229] 1. Sepsis, bacteriaemia
[0230] 2. Haemodialysed patients—bacteriemia, sepsis
[0231] 3. Peritoneal dialyses patients—peritonitis
[0232] 4. Patients with endovascular devices (heart surgery,etc)—endocarditis, bacteriemia, sepsis
[0233] 5. Orthopedic patients with prosthetic devices—septic arthritis
[0234] 6. Preventive vaccination of general population

[0235] B) Passive and active vaccination, both with special attention to T-cells with the latter one: It is an aim to induce a strong T helper response during vaccination to achieve efficient humoral response and also immunological memory. Up till now, there is no direct evidence that T-cells play an important role in clearing S. aureus infections, however, it was not adequately addressed, so far. An effective humoral response against proteinaceous antigens must involve T help, and is essential for developing memory. Naive CD4+ cells can differentiated into Th1 or Th2 cells. Since, innate immunological responses (cytokines) will influence this decision, the involvement of T-cells might be different during an acute, serious infection relative to immunization of healthy individuals with subunit vaccines, not containing components which impair the immune response during the natural course of the infection. The consequences of inducing Th1 or Th2 responses are profound. Th1 cells lead to cell-mediated immunity, whereas Th2 cells provide humoral immunity.

[0236] C) Preventive and therapeutic vaccines
[0237] Preventive: active vaccination/passive immunization of people in high risk groups, before infection
[0238] Therapeutic: passive vaccination of the already sick. Active vaccination to remove nasal carriage

### Specific Example for an Application

[0239] Elimination of MRSA Carriage and Prevention of Colonization of the Medical Staff

[0240] Carriage rates of S. aureus in the nares of people outside of the hospitals varies from 10 to 40%. Hospital patients and personnel have higher carriage rates. The rates are especially high in patients undergoing hemodialysis and in diabetics, drug addicts and patients with a variety of dermatologic conditions. Patients at highest risk for MRSA infection are those in large tertiary-care hospitals, particularly the elderly and immunocompromised, those in intensive care units, burn patients, those with surgical wounds, and patients with intravenous catheters.

[0241] The ELISA data strongly suggest that there is a pronounced IgA response to S. aureus, which is not obvious or known from the literature. Since the predominant mucosal immune response is the production of IgA with neutralizing activity, it is clear that the staphylococcal epitopes and antigens identified with the highly pure IgA preparations lead to an efficient mucosal vaccine.
[0242] Clear indication: Everybody's threat in the departments where they perform operation (esp. orthopedics, traumatology, gen. surgery)
[0243] Well-defined population for vaccination (doctors and nurses)
[0244] Health care workers identified as intranasal carriers of an epidemic strain of S. aureus are currently treated with mupirocin and rifampicin until they eliminate the bacteria. Sometimes it is not effective, and takes time.

[0245] Available animal model: There are mice models for intranasal carriage.

TABLE 1
ELISA titers of sera from non-infected individuals against multiple staphylococcal proteins.

| Sera | BHI | | | | D1 + | | | | | | | | | | | | Map- |
|---|---|---|---|---|---|---|---|---|---|---|---|---|---|---|---|---|---|
| ID# | lysate | LTA | PG | ClfA | D3 | FnBPA | sdrE | sdrC | EBP | enolase | LP309 | LP342 | coagul | Fib | SrtA | ClfB | w |
| 1 | | | | | | | | | | | | | | | | | |
| 2 | 2 . . . | 2 . . . | | 8 . . . | 4 . . . | | | | | | | 6 . . . | | 3 . . . | | | |
| 3 | 7 . . . | | | 3 . . . | | | 1 . . . | 1 . . . | | | 3 . . . | 2 . . . | 2 . . . | 2 . . . | 3 . . . | 7 . . . | 4 . . . |
| 4 | 1****** | 1****** | 1 . . . | 6 . . . | 2 . . . | 2 . . . | 3 . . . | 6 . . . | 2 . . . | 6, 7 . . . | 8 . . . | 3 . . . | | | 4 . . . | 1 . . . | 3 . . . |
| 5 | | | | | | | | | | | | | | | | | |
| 6 | | | | | | | | 4 . . . | | | 5 . . . | | | | | | |
| 7 | | 6 . . . | | | | | 7 . . . | | 7 . . . | 5 . . . | | | | 4 . . . | | | 7 . . . |
| 8 | | | | | | | 8 . . . | | 8 . . . | | | | | 5 . . . | 7 . . . | 8, | |
| | | | | | | | | | | | | | | | | 9 . . . | |
| 9 | 4, 5, 6 . . . | 4 . . . | 5 . . . | | 5 . . . | | 6 . . . | 3 . . . | 1 . . . | 3, 4 . . . | | | | 1 . . . | | 5, | |
| | | | | | | | | | | | | | | | | 6 . . . | |
| 10 | | | | | | | | | | | | | | | | 5, | |
| | | | | | | | | | | | | | | | | 6 . . . | |
| 11 | | | | | 6 . . . | | | | | | | | | | 6 . . . | | |
| 12 | | | | | | | | | | | | | 4, 5 . . . | | | | |
| 13 | | | | | | | 5 . . . | 2 . . . | | | | | | 8 . . . | | | |
| 14 | | | | | | | | | | | | | | | | | |
| 15 | 3 . . . | 5 . . . | 2, | | | 5 . . . | | | | | 6 . . . | 7 . . . | | | 8 . . . | | 8, |
| | | | 3 . . . | | | | | | | | | | | | | | 9 . . . |
| 16 | | | | | | | | | | | | | | | | | 6 . . . |
| 17 | | | | | | | | | | | | | | | | | |
| 18 | | | 6, | 1 . . . | | | | | 3 . . . | | | | | | | 4 . . . | |
| | | | 7 . . . | | | | | | | | | | | | | | |
| 19 | | | | | | | | | | | | | | | | | 1 . . . |
| 20 | | | | | | | | | | | | | | | | | |
| 21 | | | | 2 . . . | | | | | | | | | | | | | 2 . . . |
| 22 | | | | | | | | | | | | | | | | | |
| 23 | 4, 5, 6 . . . | | | 5 . . . | 3 . . . | 6 . . . | 2 . . . | 7 . . . | 4 . . . | 6, 7 . . . | 7 . . . | | 6, 7 . . . | | 2 . . . | 2 . . . | |
| 24 | | | | | | | 4 . . . | | 6 . . . | | | | | | | | 8, |
| | | | | | | | | | | | | | | | | | 9 . . . |
| 25 | | | 5 . . . | | | | | | | | | | | | | | |
| 26 | 8 . . . | | | | | | | | | | | | | 7 . . . | | | |
| 27 | | | | | | | | 8 . . . | | | 4 . . . | 4, 5 . . . | 4, 5 . . . | | 5 . . . | | |
| 28 | | | | | | | | | | | | | | | | | |
| 29 | | | | | | | | | | 1 . . . | | | | | | | |
| 30 | | | | | | | | | | | | | | | | | |
| 31 | | | | | 1 . . . | 1 . . . | | | | | | | 1 . . . | | | | |
| 32 | | | 4 . . . | | | | | | | | | | | | | | |
| 33 | | | 8 . . . | 4 . . . | | 4 . . . | | 5 . . . | | | | | | | | | |
| 34 | | | | | 7, | | | | | 2 . . . | 2 . . . | 1 . . . | 6, 7 . . . | 6 . . . | 1 . . . | | |
| | | | | | 8 . . . | | | | | | | | | | | | |
| 35 | 4, 5, 6 . . . | 8 . . . | 2, | | | | | | 5 . . . | | 1*** | | | | | 3 . . . | 4 . . . |
| | | | 3 . . . | | | | | | | | | | | | | | |
| 36 | | 3 . . . | | | | | | | | | | | | | | | |
| 37 | | | | 7 . . . | 7, | | | | | | | | 3 . . . | | | | |
| | | | | | 8 . . . | | | | | | | | | | | | |
| 38 | | | | 8 . . . | | | | | | 3, 4 . . . | | | | | | | |
| 39 | | | | | | | | | | | | | | | | | |
| 40 | | 7 . . . | 6, | | | 3 . . . | | | | | | 4, 5 . . . | | | | 8, | |
| | | | 7 . . . | | | | | | | | | | | | | 9 . . . | |

Table I. ELISA Titers of Sera from Non-infected Individuals Against Multiple Staphylococcal Proteins.

[0247] Anti-staphylococcal antibody levels were measured individually by standard ELISA with total lysate prepared from S. aureus grown in BHI medium (BHI), lipoteichoic acid (LTA), peptidoglycan (PG), 13 recombinant proteins, representing cell surface and secreted proteins, such as clumping factor A and B (ClfA, ClfB), Fibronectin-binding protein (FnBPA), SD-repeat proteins (sdrc, sdrE), MHC Class II analogous protein (map-w), Elastin-binding protein (EBP), enolase (reported to be cell surface located and immunogenic), iron transport lipoproteins (LP309, LP342), sortase (srtA), coagulase (coa), extracellular fibrinogen-binding protein (fib). Two short synthetic peptides representing 2 of the five immunodominant D repeat domains from FnBPA was also included (D1+D3) as antigens. The individual sera were ranked based on the IgG titer, and obtained a score from 1-9. Score 1 labels the highest titer serum and score 8 or 9 labels the sera which were 8^{th} or 9^{th} among all the sera tested for the given antigen. It resulted in the analyses of the top 20 percentile of sera (8-9/40). The five “best sera” meaning the most hyper reactive in terms. of anti-staphylococcal antibodies were selected based on the number of scores 1-8. **** means that the antibody reactivity against the particular antigen was exceptionally high (>2×ELISA units relative to the 2^{nd} most reactive serum).

TABLE 2a
Immunogenic proteins identified by bacterial surface
and ribosome display: S. aureus

| | | | | No. of | Location of | | |
|---|---|---|---|---|---|---|---|
| S. | | | | selected | identified | | |
| aureus | Old | Putative | | clones per | immuno- | Serum reactivity | Seq ID no: |
| antigenic | ORF | function | | ORF and | genic | with relevant region | (DNA + |
| protein | number | (by homology) | predicted immunogenic aa** | screen | region | (positive/total) | Prot) |
| SaA0003 | ORF2963P | repC | 5-20, 37-44, 52-59, 87-94, 116-132 | C: 3 | aa 112-189 | C: GSBYM94(112-189): | 171, 172 |
| | | | | | | 26/30 | |
| SaA0003 | ORF2967P | repC | 7-19, 46-57, 85-91, 110-117, 125-133, | C: 18 | aa 9-42 | C: GSBYI53(9-42): | 150, 158 |
| | | | 140-149, 156-163, 198-204, | | aa 158-174 | 1/1 | |
| | | | 236-251, 269-275, 283-290, 318-323, | | | | |
| | | | 347-363 | | | | |
| 0093 | ORF1879 | SdrC | 23-51, 75-80, 90-99, 101-107, 151-157, | A: 1, D: 5, | aa 98-182 | A: GSBXL70(98-182): | 34, 86 |
| | | | 173-180, 186-205, 215-226, | C: 1, F: 6, | aa 684-764 | 9/30 | |
| | | | 239-263, 269-274, 284-304, 317-323, | G: 2 | aa 836-870 | D: n.d. | |
| | | | 329-336, 340-347, 360-366, | | | C: GSBYH73(815-870): | |
| | | | 372-379, 391-397, 399-406, 413-425, | | | 3/16 | |
| | | | 430-436, 444-455, 499-505, | | | | |
| | | | 520-529, 553-568, 586-592, 600-617, | | | | |
| | | | 631-639, 664-678, 695-701, | | | | |
| | | | 891-903, 906-912, 926-940 | | | | |
| 0095 | ORF1881 | SdrE | 25-45, 72-77, 147-155, 198-211, | C: 12, | aa 147-192 | C: GSBYH31(147-192): | 145, 153 |
| | | | 217-223, 232-238, 246-261, 266-278, | E: 2 | | 2/14 | |
| | | | 281-294, 299-304, 332-340, | | | E: GSBZA27(144-162): | |
| | | | 353-360, 367-380, 384-396, 404-409, | | | 23/41 | |
| | | | 418-429, 434-440, 448-460, | | | | |
| | | | 465-476, 493-509, 517-523, 531-540, | | | | |
| | | | 543-555, 561-566, 576-582, | | | | |
| | | | 584-591, 603-617, 633-643, 647-652, | | | | |
| | | | 668-674, 677-683, 696-704, | | | | |
| | | | 716-728, 744-752, 755-761, 789-796, | | | | |
| | | | 809-815, 826-840, 854-862, | | | | |
| | | | 887-903, 918-924, 1110-1116, | | | | |
| | | | 1125-1131, 1145-1159 | | | | |
| 0123 | ORF1909 | unknown | 9-28, 43-48, 56-75, 109-126, 128-141, | B: 3, E: 7, | aa 168-181 | B: GSBXF80(168-181): | 35, 87 |
| | | | 143-162, 164-195, 197-216, | G: 1 | | 5/27 | |
| | | | 234-242, 244-251 | | | E: GSBZC17(168-181): | |
| | | | | | | 25/41 | |
| 0160 | ORF1941 | unknown | 4-10, 20-42, 50-86, 88-98, 102-171, | A: 1 | aa 112-188 | A: GSBXO07(112-188): | 36, 88 |
| | | | 176-182, 189-221, 223-244, 246-268, | | | 5/30 | |
| | | | 276-284, 296-329 | | | | |
| 0222 | ORF1988 | homology with | 4-9, 13-24, 26-34, 37-43, 45-51, | A: 52, | aa 45-105 | A: GSBXM63(65-95): | 37, 89 |
| | | ORF1 | 59-73, 90-96, 99-113, 160-173, | C: 18*, | aa 103-166 | 1/1 | |
| | | | 178-184, 218-228, 233-238, 255-262 | H: 19 | aa 66-153 | A: GSBXM82(103-166): | |
| | | | | | | 14/29 | |
| | | | | | | A: GSBXK44- | |
| | | | | | | bmd3(65-153): | |
| | | | | | | 47/51 | |
| 0308 | ORF2077 | Complement, | 13-27, 42-63, 107-191, 198-215, | A: 6, B: 2, | complement | A: GSBXK03(bp473- | 38, 90 |
| | | unknown | 218-225, 233-250 | C: 47, | bp 474-367 | 367): 28/69 | |
| | | | | E: 35 | | B: GSBXD29(bp465- | |
| | | | | | | 431): 10/27 | |
| 0317 | ORF2088 | preprotein | 16-29, 64-77, 87-93, 95-101, 127-143, | A: 1 | aa 1-19 | A: GSBXP37(1-19): | 39, 91 |
| | | translocase | 150-161, 204-221, 225-230, | | | 6/29 | |
| | | seca subunit | 236-249, 263-269, 281-309, 311-325, | | | | |
| | | | 337-343, 411-418, 421-432, | | | | |
| | | | 435-448, 461-467, 474-480, 483-489, | | | | |
| | | | 508-516, 542-550, 580-589, | | | | |
| | | | 602-611, 630-636, 658-672, 688-705, | | | | |
| | | | 717-723, 738-746, 775-786, | | | | |
| | | | 800-805, 812-821, 828-834 | | | | |
| 0337 | ORF2110 | Hypothetical | 26-53, 95-123, 164-176, 189-199 | D: 12 | aa 8-48 | D: n.d. | 40, 92 |
| | | protein | | | | | |
| 0358 | ORF2132 | Clumping | 8-35, 41-48, 59-66, 87-93, 139-144, | C: 1, D: 2, | aa 706-809 | D: n.d. | 41, 93 |
| | | factor A | 156-163, 198-209, 215-229, 236-244, | E: 1 | | | |
| | | | 246-273, 276-283, 285-326, | | | | |
| | | | 328-342, 349-355, 362-370, 372-384, | | | | |
| | | | 396-402, 405-415, 423-428, | | | | |
| | | | 432-452, 458-465, 471-477, 484-494, | | | | |
| | | | 502-515, 540-547, 554-559, | | | | |
| | | | 869-875, 893-898, 907-924 | | | | |
| 0360 | ORF2135 | extracellular | 7-13, 15-23, 26-33, 68-81, 84-90, | A: 46, | aa 22-56 | A: GSBXK24(23-55): | 42, 94 |
| | Empbp | matrix and | 106-117, 129-137, 140-159, 165-172, | B: 21, | aa 23-99 | 1/1 | |
| | | plasma | 177-230, 234-240, 258-278, | C: 11, | aa 97-115 | B: GSBXB43(39-54): | |
| | | binding protein | 295-319 | E: 2, | aa 233-250 | 58/71 | |
| | | | | F: 18, | aa 245-265 | A: GSBXK02- | |
| | | | | G: 7, | | bmd1(22-99): 59/59 | |
| | | | | H: 12 | | B: GSBXD82- | |
| | | | | | | bdb19(97-115): 1/1 | |
| | | | | | | F: SALAL03(233-250): | |
| | | | | | | 15/41 | |
| 0453 | ORF2227 | coma operon | 17-25, 27-55, 84-90, 95-101, 115-121 | C: 3 | aa 55-101 | C: GSBYG07(55-101): | 146, 154 |
| | | protein 2 | | | | 1/1 | |
| 0569 | ORF1640 | V8 protease | 5-32, 66-72, 87-98, 104-112, 116-124, | A: 1, F: 1 | aa 174-249 | A: GSBXS51(174-249): | 32, 84 |
| | | | 128-137, 162-168, 174-183, | | | 11/30 | |
| | | | 248-254, 261-266, 289-303, 312-331 | | | | |
| 0576 | ORF1633 | autolysin, | 4-19, 57-70, 79-88, 126-132, 144-159, | A: 21, | aa 6-66 | A: GSBXN93(6-66): | 31, 83 |
| | Autolysin | adhesion | 161-167, 180-198, 200-212, | B: 46, | aa 65-124 | 5/16 | |
| | | | 233-240, 248-255, 276-286, 298-304, | C: 55, | aa 579-592 | C: GSBYH05(45-144): | |
| | | | 309-323, 332-346, 357-366, | E: 5, | aa 590-604 | 7/8 | |
| | | | 374-391, 394-406, 450-456, 466-473, | F: 85, | | A: GSBXK66- | |
| | | | 479-487, 498-505, 507-519, | H: 19 | | bmd18(65-124): | |
| | | | 521-530, 532-540, 555-565, 571-581, | | | 16/30 | |
| | | | 600-611, 619-625, 634-642, | | | B: GSBXB89(108-123): | |
| | | | 650-656, 658-665, 676-682, 690-699, | | | 1/1 | |
| | | | 724-733, 740-771, 774-784, | | | B: GSBXB02(590-603): | |
| | | | 791-797, 808-815, 821-828, 832-838, | | | 39/71 | |
| | | | 876-881, 893-906, 922-929, | | | F: SALAM15(579-592): | |
| | | | 938-943, 948-953, 969-976, 1002-1008, | | | 25/41 | |
| | | | 1015-1035, 1056-1069, 1105-1116, | | | | |
| | | | 1124-1135, 1144-1151, 1173-1181, | | | | |
| | | | 1186-1191, 1206-1215, 1225-1230, | | | | |
| | | | 1235-1242 | | | | |
| 0657 | ORF | LPXTGVI | 9-33, 56-62, 75-84, 99-105, 122-127, | A: 2, | aa 527-544 | B: GSBXE07- | 1, 142 |
| | unknown | protein | 163-180, 186-192, 206-228, | B: 27, | | bdb1(527-542): | |
| | | | 233-240, 254-262, 275-283, 289-296, | F: 15 | | 11/71 | |
| | | | 322-330, 348-355, 416-424, | | | F: SALAX70(526-544): | |
| | | | 426-438, 441-452, 484-491, 541-549, | | | 11/41 | |
| | | | 563-569, 578-584, 624-641 | | | | |
| 0749 | ORF1462 | Carbamoyl- | 8-23, 31-38, 42-49, 61-77, 83-90, | C: 2 | aa 630-700 | C: GSBYK17(630-700): | 144, 152 |
| | | phosphate | 99-108, 110-119, 140-147, 149-155, | | | 5/9 | |
| | | synthase | 159-171, 180-185, 189-209, 228-234, | | | | |
| | | | 245-262, 264-275, 280-302, | | | | |
| | | | 304-330, 343-360, 391-409, 432-437, | | | | |
| | | | 454-463, 467-474, 478-485, | | | | |
| | | | 515-528, 532-539, 553-567, 569-581, | | | | |
| | | | 586-592, 605-612, 627-635, | | | | |
| | | | 639-656, 671-682, 700-714, 731-747, | | | | |
| | | | 754-770, 775-791, 797-834, | | | | |
| | | | 838-848, 872-891, 927-933, 935-942, | | | | |
| | | | 948-968, 976-986, 1000-1007, | | | | |
| | | | 1029-1037 | | | | |
| 944 | ORF1414 | Yfix | 6-33, 40-46, 51-59, 61-77, 84-104, | D: 4 | aa 483-511 | D: n.d. | 30, 82 |
| | | | 112-118, 124-187, 194-248, 252-296, | | | | |
| | | | 308-325, 327-361, 367-393, | | | | |
| | | | 396-437, 452-479, 484-520, 535-545, | | | | |
| | | | 558-574, 582-614, 627-633, | | | | |
| | | | 656-663, 671-678, 698-704, 713-722, | | | | |
| | | | 725-742, 744-755, 770-784, | | | | |
| | | | 786-800, 816-822, 827-837 | | | | |
| 1050 | ORF1307 | unknown | 49-72, 76-83, 95-105, 135-146, | A: 1, | aa 57-128 | A: GSBXM26(57-128): | 28, 80 |
| | | | 148-164, 183-205 | H: 45 | | 7/30 | |
| 1209 | ORF3006 | hemN homolog | 12-36, 43-50, 58-65, 73-78, 80-87, | B: 7, F: 8 | aa 167-181 | B: GSBXB76(167-179): | 54, 106 |
| | | | 108-139, 147-153, 159-172, 190-203, | | | 25/71 | |
| | | | 211-216, 224-232, 234-246, | | | F:SALBC54(169-183): | |
| | | | 256-261, 273-279, 286-293, 299-306, | | | 18/41 | |
| | | | 340-346, 354-366 | | | | |
| 1344 | ORF0212 | NifS protein | 8-16, 22-35, 49-58, 70-77, 101-121, | A: 11 | aa 34-94 | A: GSBXK59- | 5, 141 |
| | | homolog | 123-132, 147-161, 163-192, 203-209, | | | bmd21(34-94): 6/29 | |
| | | | 216-234, 238-249, 268-274, | | | | |
| | | | 280-293, 298-318, 328-333, 339-345, | | | | |
| | | | 355-361, 372-381 | | | | |
| 1356 | ORF0197 | Hypothetical | 28-55, 82-100, 105-111, 125-131, | D: 12 | aa 1-49 | D: n.d. | 4, 57 |
| | | protease | 137-143 | | | | |
| 1361 | ORF0190 | LPXTGV | 5-39, 111-117, 125-132, 134-141, | A: 1, | aa 37-49 | B: GSBXF81(37-49): | 3, 56 |
| | | protein | 167-191, 196-202, 214-232, 236-241, | B: 23, | aa 63-77 | 1/1 | |
| | | | 244-249, 292-297, 319-328, | E: 3, | aa 274-334 | B: GSBXD45- | |
| | | | 336-341, 365-380, 385-391, 407-416, | F: 31 | | bdb4(62-77): 12/70 | |
| | | | 420-429, 435-441, 452-461, | | | A: GSBXL77(274-334): | |
| | | | 477-488, 491-498, 518-532, 545-556, | | | 5/30 | |
| | | | 569-576, 581-587, 595-602, | | | F: SALAP81(62-77): | |
| | | | 604-609, 617-640, 643-651, 702-715, | | | 10/41 | |
| | | | 723-731, 786-793, 805-811, | | | | |
| | | | 826-839, 874-889 | | | | |
| 1371 | ORF0175 | YtpT, | 37-42, 57-62, 121-135, 139-145, | C: 3, E: 2, | aa 624-684 | C: GSBYG95(624-684): | 143, 151 |
| | | conserved | 183-190, 204-212, 220-227, 242-248, | G: 1 | aa 891-905 | 7/22 | |
| | | hypothetical | 278-288, 295-30, 304-309, | | | E: GSBZB45(891-905): | |
| | | protein | 335-341, 396-404, 412-433, 443-449, | | | 10/41 | |
| | | | 497-503, 505-513, 539-545, | | | | |
| | | | 552-558, 601-617, 629-649, 702-711, | | | | |
| | | | 736-745, 793-804, 814-829, | | | | |
| | | | 843-858, 864-885, 889-895, 905-913, | | | | |
| | | | 919-929, 937-943, 957-965, | | | | |
| | | | 970-986, 990-1030, 1038-1049, | | | | |
| | | | 1063-1072, 1080-1091, 1093-1116, | | | | |
| | | | 1126-1136, 1145-1157, 1163-1171, | | | | |
| | | | 1177-1183, 1189-1196, 1211-1218, | | | | |
| | | | 1225-1235, 1242-1256, 1261-1269 | | | | |
| 1491 | ORF0053 | Cmp binding | 12-29, 34-40, 63-71, 101-110, 114-122, | A: 7, C: 2, | aa 39-94 | A: GSBXM13(39-94): | 2, 55 |
| | | factor 1 | 130-138, 140-195, 197-209, | E: 7, F: 4 | | 10/29 | |
| | | homolog | 215-229, 239-253, 255-274 | | | F: SALAY30(39-53): | |
| | | | | | | 4/41 | |
| 1616 | ORF1180 | leukocidin F | 16-24, 32-39, 43-49, 64-71, 93-99, | A: 10 | aa 158-220 | A: GSBXK06(158-220): | 27, 79 |
| | | homolog | 126-141, 144-156, 210-218, 226-233, | | | 8/29 | |
| | | | 265-273, 276-284 | | | | |
| 1618 | ORF1178 | LukM homolog | 5-24, 88-94, 102-113, 132-143, | A: 13, | aa 31-61 | A: GSBXK60(31-61): | 26, 78 |
| | | | 163-173, 216-224, 254-269, 273-278, | B: 3 | aa 58-74 | 20/29 | |
| | | | 305-313, 321-327, 334-341 | C: 36, | | B: GSBXB48(58-74): | |
| | | | | E: 4, | | 49/71 | |
| | | | | F: 12, | | F: SALAY41(58-74): | |
| | | | | G: 2, | | 30/41 | |
| | | | | H: 10 | | | |
| 1632 | ORF1163 | SdrH homolog | 7-35, 54-59, 247-261, 263-272, | B: 6, | aa 105-119 | B: GSBXG53(168-186): | 25, 77 |
| | | | 302-320, 330-339, 368-374, 382-411 | E: 11, | aa 126-143 | 39/71 | |
| | | | | F: 34 | aa 168-186 | F: SALAP07(105-119): | |
| | | | | | | 11/41 | |
| 1763 | ORF1024 | unknown | 5-32, 35-48, 55-76 | C: 3 | complement | C: GSBY130(98aa): 1/1 | 24, 76 |
| | | | | | bp 237-170 | | |
| 1845 | ORF0942 | Hyaluronate | 10-26, 31-44, 60-66, 99-104, 146-153, | D: 5, F: 2 | aa 208-224 | D: n.d. | 23, 75 |
| | | lyase | 163-169, 197-205, 216-223, | | aa 672-727 | | |
| | | | 226-238, 241-258, 271-280, 295-315, | | | | |
| | | | 346-351, 371-385, 396-407, | | | | |
| | | | 440-446, 452-457, 460-466, 492-510, | | | | |
| | | | 537-543, 546-551, 565-582, | | | | |
| | | | 590-595, 635-650, 672-678, 686-701, | | | | |
| | | | 705-712, 714-721, 725-731, | | | | |
| | | | 762-768, 800-805 | | | | |
| 1951 | ORF0831 | homology with | 5-22, 42-50, 74-81, 139-145, 167-178, | A: 223, | aa: 137-237 | B: GSBXC07(180-190): | 22, 74 |
| | | ORF1 | 220-230, 246-253, 255-264 | B: 56, | aa 250-267 | 1/1 | |
| | | | | C: 167, | | A: GSBXK29(177-195): | |
| | | | | E: 43, | | 15/29 | |
| | | | | F: 100, | | B: GSBXD43(250-267): | |
| | | | | G: 13, | | 10/71 | |
| | | | | H: 102 | | F: SALAM13(178-191): | |
| | | | | | | 20/41 | |
| 1955 | ORF0826 | homology with | 4-9, 15-26, 65-76, 108-115, 119-128, | A: 1, B: 3, | aa 38-52. | A: GSBXR10(66-114): | 21, 73 |
| | | ORF1 | 144-153 | E: 1, F: 8 | aa 66-114 | 5/30 | |
| | | | | | | F: SALAM67(37-52): | |
| | | | | | | 16/41 | |
| 2031 | ORF0749 | unknown | 10-26, 31-43, 46-58, 61-66, 69-79, | B: 2, F: 2 | aa 59-74 | B: GSBXC01(59-71): | 20, 72 |
| | | | 85-92, 100-115, 120-126, 128-135, | | | 11/26 | |
| | | | 149-155, 167-173, 178-187, 189-196 | | | | |
| | | | 202-222, 225-231, 233-240, | | | | |
| | | | 245-251, 257-263, 271-292, 314-322, | | | | |
| | | | 325-334, 339-345 | | | | |
| 2086 | ORF0691 | IgG binding | 6-20, 53-63, 83-90, 135-146, 195-208, | A: 1, B: 8, | aa 208-287 | A: GSBXS55(208-287): | 19, 71 |
| | Sbi | protein | 244-259, 263-314, 319-327, | E: 24, | aa 261-276 | 38/46 | |
| | | | 337-349, 353-362, 365-374, 380-390, | F: 9, | aa 286-314 | B: GSBXB34(299-314):: | |
| | | | 397-405, 407-415 | G: 137 | | 11/71 | |
| | | | | | | F: SALAX32(261-276): | |
| | | | | | | 21/41 | |
| 2180 | ORF0594 | LPXTGIV | 11-20, 26-47, 69-75, 84-92, 102-109, | A: 3, C: 3, | aa 493-587 | A: GSBXS61(493-555): | 18, 70 |
| | | protein | 119-136, 139-147, 160-170, | E: 6, F: 2, | aa 633-715 | 1/1 | |
| | | | 178-185, 190-196, 208-215, 225-233, | H: 6 | aa 704-760^{#} | A: GSBXL64(496-585): | |
| | | | 245-250, 265-272, 277-284, | | aa 760-832 | 1/1 | |
| | | | 300-306, 346-357, 373-379, 384-390, | | (aa 832- | A: GSBXS92(760-841): | |
| | | | 429-435, 471-481, 502-507, | | 887)^{#} | 1/1 | |
| | | | 536-561, 663-688, 791-816, 905-910, | | | A: bmd4(704-760): | |
| | | | 919-933, 977-985, 1001-1010, | | | 16/30^{#} | |
| | | | 1052-1057, 1070-1077, 1082-1087, | | | (A: bmd4(830-885): | |
| | | | 1094-1112 | | | 16/30)^{#} | |
| | | | | | | F: SALBC43(519-533): | |
| | | | | | | 4/41 | |
| 2184 | ORF0590 | FnbpB | 5-12, 18-37, 104-124, 139-145, | A: 2, C: 4, | aa 701-777 | A: GSBXM62(702-777): | 17, 69 |
| | | | 154-166, 175-181, 185-190, 193-199, | G: 9 | aa 783-822 | 28/28 | |
| | | | 203-209, 235-244, 268-274, | | | A: GSBXR22(783-855): | |
| | | | 278-292, 299-307, 309-320, 356-364, | | | 1/1 | |
| | | | 375-384, 390-404, 430-440, | | | | |
| | | | 450-461, 488-495, 505-511, 527-535, | | | | |
| | | | 551-556, 567-573, 587-593, | | | | |
| | | | 599-609, 624-631, 651-656, 665-671, | | | | |
| | | | 714-726, 754-766, 799-804, | | | | |
| | | | 818-825, 827-833, 841-847, 855-861, | | | | |
| | | | 876-893, 895-903, 927-940 | | | | |
| 2186 | ORF0588 | Fnbp | 8-29, 96-105, 114-121, 123-129, | A: 4, C: 4, | aa 710-787 | C: GSBYN05(710-787): | 16, 68 |
| | | | 141-147, 151-165, 171-183, 198-206, | D: 5, E: 2 | aa 855-975 | 19/25 | |
| | | | 222-232, 253-265, 267-277, | | aa 916-983 | D: n.d. | |
| | | | 294-300, 302-312, 332-338, 362-368, | | | A: GSBXP01(916-983): | |
| | | | 377-383, 396-402, 410-416, | | | 17/30 | |
| | | | 451-459, 473-489, 497-503, 537-543, | | | | |
| | | | 549-559, 581-600, 623-629, | | | | |
| | | | 643-649, 655-666, 680-687, 694-700, | | | | |
| | | | 707-712, 721-727, 770-782, | | | | |
| | | | 810-822, 874-881, 883-889, 897-903, | | | | |
| | | | 911-917, 925-931, 933-939, | | | | |
| | | | 946-963, 965-973, 997-1010 | | | | |
| 2224 | ORF0551 | unknown | 49-56, 62-68, 83-89, 92-98, 109-115, | B: 2 | aa 34-46 | B: GSBXD89(34-46): | 15, 67 |
| | | | 124-131, 142-159, 161-167, | | | 1/1 | |
| | | | 169-175, 177-188, 196-224, 230-243, | | | | |
| | | | 246-252 | | | | |
| 2254 | ORF0519 | Conserved | 14-22, 32-40, 52-58, 61-77, 81-93, | D: 3 | aa 403-462 | D: n.d. | 14, 66 |
| | | hypothetical | 111-117, 124-138, 151-190, 193-214, | | | | |
| | | protein | 224-244, 253-277, 287-295, | | | | |
| | | | 307-324, 326-332, 348-355, 357-362, | | | | |
| | | | 384-394, 397-434, 437-460, | | | | |
| | | | 489-496, 503-510, 516-522, 528-539, | | | | |
| | | | 541-547, 552-558, 563-573, | | | | |
| | | | 589-595, 602-624, 626-632, 651-667, | | | | |
| | | | 673-689, 694-706, 712-739, | | | | |
| | | | 756-790 | | | | |
| 2264 | ORF0509 | ORF1; | 5-31, 47-55, 99-104, 133-139, 156-172, | A: 131, | aa 7-87 | A: GSBXP22(145-196): | 13, 65 |
| | | homology with | 214-224, 240-247 | B: 51, | aa 133-242 | 1/1 | |
| | | putative | | C: 13, | | A: GSBXK05- | |
| | | secreted | | E: 43, | | bmd16(178-218): | |
| | | antigen | | F: 78, | | 6/29 | |
| | | precursor from | | G: 2, | | B: GSBXE24- | |
| | | S. epidermidis | | H: 17 | | bdb20(167-178):1/1 | |
| | | | | | | F: SALAQ91(173-184): | |
| | | | | | | 15/41 | |
| 2268 | ORF0503 | IsaA, possibly | 7-19, 26-45, 60-68, 94-100, 111-119, | A: 7, | aa 67-116 | A: GSBXK88(67-116): | 12, 64 |
| | | adhesion/ | 126-137, 143-148, 169-181, | B: 65, | aa 98-184 | 1/1 | |
| | | aggregation | 217-228 | C: 3, E: 2, | aa 182-225 | A: GSBXN19(98-184): | |
| | | | | F: 53 | | 22/29 | |
| | | | | | | A: GSBXN32(182-225): | |
| | | | | | | 34/71 | |
| | | | | | | B: GSBXB71(196-209): | |
| | | | | | | 16/29 | |
| | | | | | | F: SALAL22(196-210): | |
| | | | | | | 16/41 | |
| 2344 | ORF0426 | Clumping | 4-10, 17-45, 120-127, 135-141, | D: 9, E: 1, | aa 706-762 | D: n.d. | 11, 63 |
| | | factor B | 168-180, 187-208, 216-224, 244-254, | F: 3, H: 4 | aa 810-852 | | |
| | | | 256-264, 290-312, 322-330, | | | | |
| | | | 356-366, 374-384, 391-414, 421-428, | | | | |
| | | | 430-437, 442-449, 455-461, | | | | |
| | | | 464-479, 483-492, 501-512, 548-555, | | | | |
| | | | 862-868, 871-876, 891-904 | | | | |
| 2351 | ORF0418 | aureolysin | 10-29, 46-56, 63-74, 83-105, 107-114, | A: 1, C: 6 | aa 83-156 | A: GSBXO46(83-156): | 10, 62 |
| | | | 138-145, 170-184, 186-193, | | | 14/29 | |
| | | | 216-221, 242-248, 277-289, 303-311, | | | | |
| | | | 346-360, 379-389, 422-428, | | | | |
| | | | 446-453, 459-469, 479-489, 496-501 | | | | |
| 2359 | ORF0409 | ISSP, | 4-29, 92-99, 119-130, 228-236, | B: 4, F: 11 | aa 168-184 | B: GSBXD01(168-184): | 9, 61 |
| | | immunogenic | 264-269, 271-280, 311-317, 321-331, | | aa 206-220 | 1/1 | |
| | | secreted | 341-353, 357-363, 366-372, | | aa 297-309 | B: GSBXD62(205-220): | |
| | | protein | 377-384, 390-396, 409-415, 440-448, | | | 1/1 | |
| | | precursor, | 458-470, 504-520, 544-563, | | | B: GSBXC17(297-309): | |
| | | putative | 568-581, 584-592, 594-603, 610-616 | | | 6/27 | |
| | | | | | | F: SALAL04(205-220): | |
| | | | | | | 9/41 | |
| 2378 | ORF0398 | SrpA | 18-23, 42-55, 69-77, 85-98, 129-136, | C: 1, D: 7, | aa 198-258 | C: GSBYI73(646-727): | 8, 60 |
| | | | 182-188, 214-220, 229-235, | F: 4, | aa 646-727 | 2/9 | |
| | | | 242-248, 251-258, 281-292, 309-316, | H: 11 | aa 846-857 | F: SALAO33(846-857): | |
| | | | 333-343, 348-354, 361-367, | | aa 2104- | 10/41 | |
| | | | 393-407, 441-447, 481-488, 493-505, | | 2206 | D: n.d. | |
| | | | 510-515, 517-527, 530-535, | | | | |
| | | | 540-549, 564-583, 593-599, 608-621, | | | | |
| | | | 636-645, 656-670, 674-687, | | | | |
| | | | 697-708, 726-734, 755-760, 765-772, | | | | |
| | | | 785-792, 798-815, 819-824, | | | | |
| | | | 826-838, 846-852, 889-904, 907-913, | | | | |
| | | | 932-939, 956-964, 982-1000, | | | | |
| | | | 1008-1015, 1017-1024, 1028-1034, | | | | |
| | | | 1059-1065, 1078-1084, 1122-1129, | | | | |
| | | | 1134-1143, 1180-1186, 1188-1194, | | | | |
| | | | 1205-1215, 1224-1230, 1276-1283, | | | | |
| | | | 1333-1339, 1377-1382, 1415-1421, | | | | |
| | | | 1448-1459, 1467-1472, 1537-1545, | | | | |
| | | | 1556-1566, 1647-1654, 1666-1675, | | | | |
| | | | 1683-1689, 1722-1737, 1740-1754, | | | | |
| | | | 1756-1762, 1764-1773, 1775-1783, | | | | |
| | | | 1800-1809, 1811-1819, 1839-1851, | | | | |
| | | | 1859-1866, 1876-1882, 1930-1939, | | | | |
| | | | 1947-1954, 1978-1985, 1999-2007, | | | | |
| | | | 2015-2029, 2080-2086, 2094-2100, | | | | |
| | | | 2112-2118, 2196-2205, 2232-2243 | | | | |
| 2466 | ORF0302 | YycH protein | 16-38, 71-77, 87-94, 105-112, 124-144, | D: 14 | aa 401-494 | D: n.d. | 7, 59 |
| | | | 158-164, 169-177, 180-186, | | | | |
| | | | 194-204, 221-228, 236-245, 250-267, | | | | |
| | | | 336-343, 363-378, 385-394, | | | | |
| | | | 406-412, 423-440, 443-449 | | | | |
| 2470 | ORF0299 | Conserved | 4-9, 17-41, 50-56, 63-69, 82-87, | C: 3 | aa 414-455 | C: GSBYH60(414-455): | 169, 170 |
| | | hypothetical | 108-115, 145-151, 207-214, 244-249, | | | 28/31 | |
| | | protein | 284-290, 308-316, 323-338, | | | | |
| | | | 348-358, 361-378, 410-419, 445-451, | | | | |
| | | | 512-522, 527-533, 540-546, | | | | |
| | | | 553-558, 561-575, 601-608, 632-644, | | | | |
| | | | 656-667, 701-713, 727-733, | | | | |
| | | | 766-780 | | | | |
| 2498 | ORF0267 | Conserved | 33-43, 45-51, 57-63, 65-72, 80-96, | D: 12 | aa 358-411 | D: 17/21 | 6, 58 |
| | | hypothetical | 99-110, 123-129, 161-171, 173-179, | | aa 588-606 | | |
| | | protein | 185-191, 193-200, 208-224, 227-246, | | | | |
| | | | 252-258, 294-308, 321-329, | | | | |
| | | | 344-352, 691-707 | | | | |
| 2548 | ORF2711 | IgG binding | 4-16, 24-57, 65-73, 85-91, 95-102, | A: 55, | aa 1-48 | A: GSBXK68(1-73): | 53, 105 |
| | | protein A | 125-132, 146-152, 156-163, 184-190, | B: 54, | aa 47-143 | 21/30 | |
| | | | 204-210, 214-221, 242-252, | C: 35, | aa 219-285 | A: GSBXK41(47-135): | |
| | | | 262-268, 272-279, 300-311, 320-337, | F: 59, | aa 345-424 | 1/1 | |
| | | | 433-440, 472-480, 505-523 | G: 56, | | A: GSBXN38(219-285): | |
| | | | | H: 38 | | 19/30 | |
| | | | | | | A: GSBXL11(322-375): | |
| | | | | | | 10/30 | |
| | | | | | | B: GSBXB22(406-418): | |
| | | | | | | 37/71 | |
| | | | | | | F: SALAM17(406-418): | |
| | | | | | | 29/41 | |
| 2577 | ORF2683 | Hypothetical | 4-21, 49-56, 65-74, 95-112, 202-208, | C: 6 | aa 99-171 | C: GSBYL56(99-171): | 149, 157 |
| | | protein | 214-235 | | | 1/1 | |
| 2642 | ORF2614 | unknown | 34-58, 63-69, 74-86, 92-101, 130-138, | C: 1, E: 1 | aa 5-48 | C: bhe3(5-48): | 52, 104 |
| | | | 142-150, 158-191, 199-207, | | | 25/30^{##} | |
| | | | 210-221, 234-249, 252-271 | | | | |
| 2664 | ORF2593 | Conserved | 7-37, 56-71, 74-150, 155-162, 183-203, | D: 35 | aa 77-128 | D: n.d. | 51, 103 |
| | | hypothetical | 211-222, 224-234, 242-272 | | | | |
| | | protein | | | | | |
| 2670 | ORF2588 | Hexose | 18-28, 36-49, 56-62, 67-84, 86-95, | D: 16 | aa 328-394 | D: n.d. | 50, 102 |
| | | transporter | 102-153, 180-195, 198-218, 254-280 | | | | |
| | | | 284-296, 301-325, 327-348, | | | | |
| | | | 353-390, 397-402, 407-414, 431-455 | | | | |
| 2680 | ORF2577 | Coagulase | 4-18, 25-31, 35-40, 53-69, 89-102, | C: 26, | aa 438-516 | C: GSBYH16(438-516): | 148, 156 |
| | | | 147-154, 159-165, 185-202, 215-223, | G: 4, H: 8 | aa 505-570 | 3/5 | |
| | | | 284-289, 315-322, 350-363, | | aa 569-619 | C: GSBYG24(505-570): | |
| | | | 384-392, 447-453, 473-479, 517-523, | | | 1/7 | |
| | | | 544-550, 572-577, 598-604, | | | C: GSBYL82(569-619): | |
| | | | 617-623 | | | 2/7 | |
| 2740 | ORF2515 | Hypothetical | 5-44, 47-55, 62-68, 70-78, 93-100, | D: 4 | aa 1-59 | D: n.d. | 49, 101 |
| | | protein | 128-151, 166-171, 176-308 | | | | |
| 2746 | ORF2507 | homology with | 5-12, 15-20, 43-49, 94-106, 110-116, | A: 1, | aa 63-126 | A: GSBXO40(66-123): | 48, 100 |
| | | ORF1 | 119-128, 153-163, 175-180, | H: 13 | | 8/29 | |
| | | | 185-191, 198-209, 244-252, 254-264, | | | | |
| | | | 266-273, 280-288, 290-297 | | | | |
| 2797 | ORF2470 | unknown | 10-27, 37-56, 64-99, 106-119, 121-136, | B: 3, E: 2, | aa 183-200 | B: GSBXE85(183-200): | 47, 99 |
| | | | 139-145, 148-178, 190-216, | F: 13, | aa 349-363 | 11/27 | |
| | | | 225-249, 251-276, 292-297, 312-321, | H: 3 | | F: SALAQ47(183-200): | |
| | | | 332-399, 403-458 | | | 8/41 | |
| 2798 | ORF2469 | Lipase (geh) | 12-35, 93-99, 166-179, 217-227, | A: 41, | aa 48-136 | C: GSBYG01(48-136): | 46, 98 |
| | | | 239-248, 269-276, 288-294, 296-320, | B: 42, | aa 128-172 | 2/6 | |
| | | | 322-327, 334-339, 344-356, | C: 3, | aa 201-258 | A: GSBXM31- | |
| | | | 362-371, 375-384, 404-411, 433-438, | F: 35, | | bmd12(128-188): | |
| | | | 443-448, 455-464, 480-486, | G: 1, | | 11/30 | |
| | | | 497-503, 516-525, 535-541, 561-570, | H: 11 | | B: GSBXE16(165-177): | |
| | | | 579-585, 603-622, 633-641 | | | 10/30 | |
| | | | | | | A: GSBXN20(201-258): | |
| | | | | | | 8/30 | |
| | | | | | | F: SALAW05(165-177): | |
| | | | | | | 13/41 | |
| 2815 | ORF2451 | Conserved | 5-32, 34-49 | D: 21 | aa 1-43 | D: n.d. | 45, 97 |
| | | hypothetical | | | | | |
| | | protein | | | | | |
| 2914 | ORF2351 | metC | 39-44, 46-80, 92-98, 105-113, 118-123, | A: 1, | aa 386-402 | A: GSBXM18(386-402): | 44, 96 |
| | | | 133-165, 176-208, 226-238, | C: 14, | | 17/29 | |
| | | | 240-255, 279-285, 298-330, 338-345 | F: 2 | | | |
| | | | 350-357, 365-372, 397-402, | | | | |
| | | | 409-415, 465-473, 488-515, 517-535, | | | | |
| | | | 542-550, 554-590, 593-601, | | | | |
| | | | 603-620, 627-653, 660-665, 674-687, | | | | |
| | | | 698-718, 726-739 | | | | |
| 2960 | ORF2298 | putative | 13-36, 40-49, 111-118, 134-140, | C: 101, | aa 1-85 | C: GSBYG32(1-85):: | 43, 95 |
| | | Exotoxin | 159-164, 173-183, 208-220, 232-241, | E: 2, | aa 54-121 | 6/7 | |
| | | | 245-254, 262-271, 280-286, | H: 58 | aa 103-195 | C: GSBYG61- | |
| | | | 295-301, 303-310, 319-324, 332-339 | | | bhe2(54-121): 26/30 | |
| | | | | | | C: GSBYN80(103-195): | |
| | | | | | | 13/17 | |
| 2963 | ORF2295 | putative | 13-28, 40-46, 69-75, 86-92, 114-120, | C: 3, E: 3, | aa 22-100 | C: GSBYJ58(22-100): | 147, 155 |
| | | Exotoxin | 126-137, 155-172, 182-193, | G: 1 | | 9/15 | |
| | | | 199-206, 213-221, 232-238, 243-253 | | | | |
| | | | 270-276, 284-290 | | | | |
| 3002 | ORF1704 | homology with | 4-21, 28-40, 45-52, 59-71, 92-107, | A: 2, C: 1, | aa 21-118 | A: GSBXL06(21-118): | 33, 85 |
| | | ORF1 | 123-137, 159-174, 190-202, 220-229, | H: 4 | | 50/52 | |
| | | | 232-241, 282-296, 302-308, | | | | |
| | | | 312-331 | | | | |
| 3200 | ORF1331 | putative | 6-15, 22-32, 58-73, 82-88, 97-109, | A: 11, | aa 5-134 | A: GSBXL07(5-134): | 29, 81 |
| | | extracellular | 120-131, 134-140, 151-163, 179-185, | B: 11, | | 6/28 | |
| | | matrix binding | 219-230, 242-255, 271-277, | C: 36 | | | |
| | | protein | 288-293, 305-319, 345-356, 368-381, | | | | |
| | | | 397-406, 408-420, 427-437, | | | | |
| | | | 448-454, 473-482, 498-505, 529-535, | | | | |
| | | | 550-563, 573-580, 582-590, | | | | |
| | | | 600-605, 618-627, 677-685, 718-725, | | | | |
| | | | 729-735, 744-759, 773-784, | | | | |
| | | | 789-794, 820-837, 902-908, 916-921, | | | | |
| | | | 929-935, 949-955, 1001-1008, | | | | |
| | | | 1026-1032, 1074-1083, 1088-1094, | | | | |
| | | | 1108-1117, 1137-1142, 1159-1177, | | | | |
| | | | 1183-1194, 1214-1220, 1236-1252, | | | | |
| | | | 1261-1269, 1289-1294, 1311-1329, | | | | |
| | | | 1336-1341, 1406-1413, 1419-1432, | | | | |
| | | | 1437-1457, 1464-1503, 1519-1525, | | | | |
| | | | 1531-1537, 1539-1557, 1560-1567, | | | | |
| | | | 1611-1618, 1620-1629, 1697-1704, | | | | |
| | | | 1712-1719, 1726-1736, 1781-1786, | | | | |
| | | | 1797-1817, 1848-1854, 1879-1890, | | | | |
| | | | 1919-1925, 1946-1953, 1974-1979 | | | | |

Bacterial surface display: A, LSA250/1 library in fhuA with patient sera 1 (655); B, LSA50/6 library in lamB with patient sera 1 (484); C, LSA250/1 library in fhuA with IC sera 1 (571); E, LSA50/6 library in lamB with IC sera 2 (454); F, LSA50/6 library in lamB with patient sera P1 (1105); G, LSA50/6 library in lamb with IC sera 1 (471) ); H, LSA250/1 library in fhuA with patient sera 1 (IgA, 708).
Ribosome display: D, LSA250/1 library with IC sera (1686).
*identified 18 times of 33 screened; was therefore eliminated from screen C.
**prediction of antigenic sequences longer than 5 amino acids was performed with the programme ANTIGENIC (Kolaskar and Tongaonkar, 1990);
^{#}identical sequence present twice in ORF;
^{##}clone not in database (not sequence by TIGR).

[0248] TABLE 2b
Additional immunogenic proteins identified by bacterial
surface and ribosome display: S. aureus

| | | | No. of | | | |
|---|---|---|---|---|---|---|
| | | | selected | Location of | | |
| S. | | | clones | identified | | Seq ID |
| aureus | | | per ORF | immuno- | | no: |
| antigenic | Putative function | | and | genic | Serum reactivity with relevant | (DNA + |
| protein | (by homology) | predicted immunogenic aa** | screen | region | region (positive/total) | Prot) |
| ARF0280 | Putative protein | 7-14 | F: 6 | aa 25-43 | SALAM59(25-43): 1/1 | 401, 402 |
| CRF0145 | Putative protein | 18-28, 31-37, 40-47, 51-83, 86-126 | F: 5 | aa 81-90 | SALAZ40(81-90): 2/12 | 403, 404 |
| CRF0250 | Putative protein | 4-24, 26-46, 49-86 | G: 8 | aa 60-76 | SALAJ87(60-76): n.d. | 365, 378 |
| CRF0308 | Putative protein | 40-46 | A: 6, B: 2, | aa 5-38 | A: GSBXK03(7-36): 28/69 | 391, 392 |
| | | | C: 47, | | B: GSBXD29(10-20): 10/27 | |
| | | | E: 35 | | | |
| CRF0337 | Unknown | 4-17 | D: 3 | aa 1-20 | D: n.d. | 469; 486 |
| CRF0497 | Putative protein | 4-28, 31-53, 58-64 | B: 13, F: 5 | aa 18-34 | GSBXF31(19-34): 1/7 | 366, 379 |
| CRF0538 | Unknown | 4-20 | D: 7 | aa 1-11 | D: n.d. | 470; 487 |
| CRF0750 | Putative protein | 4-11, 18-24, 35-40 | G: 44 | aa 25-39 | SALAG92(26-39): n.d. | 367, 380 |
| CRF1145 | Unknown | 4-57 | D: 28 | aa 16-32 | D: n.d. | 464; 481 |
| CRF1247 | Putative protein | 4-25, 27-56 | F: 6 | aa 36-46 | SALAR23(36-46): n.d. | 368, 381 |
| CRF1256 | Putative protein | 19-25, 38-47, 55-74, 77-87 | G: 5 | aa 54-67 | SALAG65(54-67): n.d. | 369, 382 |
| CRF1356 | Unknown | 8-15; 18-24; 27-38 | D: 5 | aa 5-33 | D: n.d. | 471; 488 |
| CRF1763 | Putative protein | 4-9, 23-41, 43-58, 71-85 | C: 3 | aa 1-22 | C: GSBYI30(1-22): 1/1 | 407, 408 |
| CRF1783 | Unknown | 8-161 | D: 5 | aa 76-127 | D: n.d. | 465; 482 |
| CRF1845 | Unknown | 4-28; 30-36 | D: 272 | aa 1-17 | D: n.d. | 472; 489 |
| CRF1861 | Unknown | 6-11; 13-34; 36-50 | D: 8 | aa 4-27 | D: n.d. | 466; 483 |
| CRF1928 | Putative protein | 4-9, 17-30 | F: 9 | aa 13-22 | SALAR41(13-22): n.d. | 370, 383 |
| CRF2004 | Putative protein | 18-38 | F: 13 | aa 16-32 | SALAM75(16-32): n.d. | 371, 384 |
| CRF2155 | Putative protein | 4-15, 30-58 | F: 9 | aa 54-66 | SALAQ54(54-66): 1/12 | 372, 385 |
| CRF2180 | Putative protein | 4-61, 65-72, 79-95, 97-106 | E: 13 | aa 86-99 | GSBZE08(86-99): n.d. | 373, 386 |
| CRF2207 | Unknown | 4-13 | D: 3 | aa 17-39 | D: n.d. | 473; 490 |
| CRF2305 | Putative protein | 4-9, 22-33, 44-60 | C: 5 | aa 80-116 | GSBYL75(80-116): n.d. | 374, 387 |
| CRF2341 | Putative protein | 4-23, 30-44, 49-70 | F: 8 | aa 46-55 | SALAW31(46-55): n.d. | 375, 388 |
| CRF2349 | Putative protein | 4-32, 39-46, 62-69, 77-83 | B: 10, F: 4 | aa 46-67 | GSBXC92(52-67): 2/11 | 376, 389 |
| CRF2356 | Unknown | 4-18 | D: 3 | aa 3-18 | D: n.d. | 475; 492 |
| CRF2452 | Unknown | 4-31 | D: 9 | aa 7-21 | D: n.d. | 476; 493 |
| CRF2498 | Putative protein | 4-29, 31-41 | G: 8 | aa 2-15 | SALAF30(3-15): n.d. | 377, 390 |
| CRF2553 | Unknown | 4-35; 37-42 | D: 4 | aa 1-20 | D: n.d. | 474; 491 |
| CRF2578 | Unknown | 5-25; 30-39 | D: 11 | aa 9-30 | D: n.d. | 467; 484 |
| CRF2664 | Unknown | 11-21 | D: 17 | aa 1-14 | D: n.d. | 477; 494 |
| CRF2729 | Putative protein | 10-41, 50-57 | F: 3 | aa 40-56 | SALAQ25(40-56): 1/1 | 405, 406 |
| CRF2863/1 | Unknown | 4-43 | D: 78 | aa 17-40 | D: n.d. | 478; 495 |
| CRF2863/2 | Unknown | 4-46 | D: 78 | aa 44-49 | D: n.d. | 479; 496 |
| CRFA002 | Unknown | 17-39; 52-59 | D: 3 | aa 38-55 | D: n.d. | 463; 480 |
| CRFN1 | Unknown | 5-20; 37-44; 52-59; 87-94; 116-132 | D: 4 | aa 94-116 | D: n.d. | 468; 485 |
| ORF0188 | UDP-N-acetyl- | 11-18, 43-56, 58-97, 100-118, 120-148, | B: 4, F: 29 | aa 197-210 | SALAM14(198-209): n.d. | 397, 398, |
| | D-mannosamine | 152-171, 195-203, 207-214, | | | | |
| | transferase, | 220-227, 233-244 | | | | |
| | putative | | | | | |
| ORF0254 | Multidrug efflux | 4-33, 35-56, 66-99, 109-124, 136-144 | D: 3 | aa 155-175 | D: n.d. | 297, 325 |
| | transporter | 151-180, 188-198, 201-236, | | | | |
| | | 238-244, 250-260, 266-290, 294-306, | | | | |
| | | 342-377 | | | | |
| ORF0307 | Conserved | 4-23, 25-67, 76-107, 109-148 | D: 3 | aa 9-44 | D: n.d. | 298, 326 |
| | hypothetical | | | | | |
| | protein | | | | | |
| ORF0452 | Conserved | 4-35, 41-47, 55-75, 77-89, 98-113, | D: 5 | aa 105-122 | D: n.d. | 299, 327 |
| | hypothetical | 116-140, 144-179, 194-215, 232-254, | | | | |
| | protein | 260-273, 280-288, 290-302, | | | | |
| | | 315-323, 330-369, 372-385, 413-432 | | | | |
| ORF0456 | Na+/ | 4-81 | D: 66 | aa 1-21 | D: n.d. | 300, 328 |
| | H+Antiporter | | | | | |
| ORF0556 | Iron(III)dicitrate | 5-23, 50-74, 92-99, 107-122, 126-142, | D: 10 | aa 1-18 | D: n.d. | 301, 329 |
| | binding protein | 152-159, 172-179, 188-196, | | | | |
| | | 211-218, 271-282 | | | | |
| ORF0629 | Hypothetical | 9-44, 63-69, 75-82, 86-106, 108-146, | D: 313 | aa 13-37 | D: n.d. | 302, 330 |
| | Protein | 153-161, 166-178, 185-192, | | | | |
| | | 233-239, 258-266, 302-307 | | | | |
| ORF0637 | GTP-binding | 10-19, 22-32, 95-105, 112-119, 121-133 | F: 3 | aa 107-119 | F: SALAX70(107-119): 10/41 | 393, 395 |
| | protein TypA | 140-154, 162-174, 186-200, | | | | |
| | | 207-224, 238-247, 254-266, 274-280, | | | | |
| | | 288-294, 296-305, 343-351, | | | | |
| | | 358-364, 366-373, 382-393, 403-413, | | | | |
| | | 415-422, 440-447, 499-507, | | | | |
| | | 565-575, 578-588 | | | | |
| ORF0713 | Conserved | 22-51, 53-71, 80-85, 93-99, 105-112, | D: 3 | aa 487-513 | D: n.d. | 303, 331 |
| | hypothetical | 123-146, 151-157, 165-222, | | | | |
| | transmembrane | 226-236, 247-270, 290-296, 301-324, | | | | |
| | protein, | 330-348, 362-382, 384-391, | | | | |
| | putative | 396-461, 463-482, 490-515 | | | | |
| ORF0788 | Cell division | 104-111, 158-171, 186-197, 204-209, | D: 4 | aa 152-178 | D: n.d. | 304, 332 |
| | protein | 230-247, 253-259, 269-277, | | | | |
| | | 290-314, 330-340, 347-367, 378-388 | | | | |
| ORF0797 | Conserved | 11-40, 56-75, 83-102, 112-117, 129-147, | D: 12 | aa 196-218 | D: n.d. | 305, 333 |
| | hypothetical | 154-168, 174-191, 196-270, | | | | |
| | protein | 280-344, 354-377, 380-429, 431-450, | | | | |
| | | 458-483, 502-520, 525-532, | | | | |
| | | 595-602, 662-669, 675-686, 696-702, | | | | |
| | | 704-711, 720-735, 739-748, | | | | |
| | | 750-756, 770-779, 793-800, 813-822, | | | | |
| | | 834-862 | | | | |
| ORF0836 | Cell Division | 34-91, 100-119, 126-143, 147-185, | D: 5 | aa 26-56 | D: n.d. | 306, 334 |
| | Protein | 187-197, 319-335, 349-355, 363-395, | | | | |
| | | 397-412, 414-422, 424-440, | | | | |
| | | 458-465, 467-475, 480-505, 507-529, | | | | |
| | | 531-542, 548-553, 577-589, | | | | |
| | | 614-632, 640-649, 685-704, 730-741, | | | | |
| | | 744-751, 780-786 | | | | |
| ORP1318 | Amino acid | 11-21, 25-32, 34-54, 81-88, 93-99, | D: 8 | aa 127-152 | D: n.d. | 307, 335 |
| | permease | 105-117, 122-145, 148-174, 187-193, | | | | |
| | | 203-218, 226-260, 265-298, | | | | |
| | | 306-318, 325-381, 393-399, 402-421, | | | | |
| | | 426-448 | | | | |
| ORF1321 | Pyruvat kinase | 4-11, 50-67, 89-95, 103-109, 112-135, | E: 6 | aa 420-432 | E: GSBZE16(420-432): 5/41 | 197, 216 |
| | | 139-147, 158-170, 185-204, | | | | |
| | | 213-219, 229-242, 248-277, 294-300, | | | | |
| | | 316-323, 330-335, 339-379, | | | | |
| | | 390-402, 408-422, 431-439, 446-457, | | | | |
| | | 469-474, 484-500, 506-513, | | | | |
| | | 517-530, 538-546, 548-561 | | | | |
| ORF1388 | LPXTG cell wall | 11-31, 86-91, 103-111, 175-182, | D: 3 | aa 508-523 | D: n.d. | 308, 336 |
| | anchor motif | 205-212, 218-226, 242-247, 260-269, | | | | |
| | | 279-288, 304-313, 329-334, | | | | |
| | | 355-360, 378-387, 390-399, 407-435, | | | | |
| | | 468-486, 510-516, 535-547, | | | | |
| | | 574-581, 604-615, 635-646, 653-659, | | | | |
| | | 689-696, 730-737, 802-812, | | | | |
| | | 879-891, 893-906, 922-931, 954-964, | | | | |
| | | 997-1009, 1031-1042, 1089-1096, | | | | |
| | | 1107-1120, 1123-1130, 1149-1162, | | | | |
| | | 1176-1184, 1192-1207, 1209-1215, | | | | |
| | | 1253-1259, 1265-1275, 1282-1295, | | | | |
| | | 1304-1310, 1345-1361, 1382-1388, | | | | |
| | | 1394-1400, 1412-1430, 1457-1462, | | | | |
| | | 1489-1507, 1509-1515, 1535-1540, | | | | |
| | | 1571-1591, 1619-1626, 1635-1641, | | | | |
| | | 1647-1655, 1695-1701, 1726-1748, | | | | |
| | | 1750-1757, 1767-1783, 1802-1807, | | | | |
| | | 1809-1822, 1844-1875, 1883-1889, | | | | |
| | | 1922-1929, 1931-1936, 1951-1967, | | | | |
| | | 1978-1989, 1999-2008, 2023-2042, | | | | |
| | | 2056-2083, 2101-2136, 2161-2177 | | | | |
| ORF1402 | 3,4-dihydroxy-2- | 18-23, 32-37, 54-63, 65-74, 83-92, | E: 3 | aa 121-137 | E: GSBZB68(121-137): 7/41 | 198, 217 |
| | butanone-4- | 107-114, 123-139, 144-155, 157-164, | | | | |
| | phosphate | 191-198, 232-240, 247-272, | | | | |
| | synthase | 284-290, 295-301, 303-309, 311-321, | | | | |
| | | 328-341, 367-376 | | | | |
| ORF1473 | hemolysin II | 4-36, 39-47, 57-65, 75-82, 108-114, | F: 1 | aa 245-256 | F: SALAP76(245-256): 6/41 | 199, 218 |
| | (LukD- | 119-126, 135-143, 189-195, 234-244, | | | | |
| | Leuktoxin) | 250-257, 266-272, 311-316 | | | | |
| ORF1523 | Iron uptake | 13-27, 29-44, 46-66, 68-81, 97-116, | D: 3 | aa 120-135 | D: n.d. | 309, 337 |
| | regulator | 138-145 | | | | |
| ORF1707 | inner membrane | 4-23, 57-77, 89-103, 119-125, 132-172, | F: 1 | aa 104-118 | F: SALBC82(104-118): 7/41 | 200, 219 |
| | protein, 60 kDa | 179-197, 210-254, 256-265, | | | | |
| | | 281-287 | | | | |
| ORF1754 | amiB | 5-10, 16-24, 62-69, 77-96, 100-115, | D: 3 | aa 293-312 | D: n.d. | 310, 338 |
| | | 117-126, 137-156, 165-183, 202-211, | | | | |
| | | 215-225, 229-241, 250-260, | | | | |
| | | 267-273, 290-300, 302-308, 320-333, | | | | |
| | | 336-342, 348-356, 375-382, | | | | |
| | | 384-389 | | | | |
| ORF1783 | Mrp protein | 5-29, 46-52, 70-76, 81-87, 155-170, | F: 2 | aa 850-860 | F: SALAQ36(850-860): 8/41 | 201, 220 |
| | (fmtB) | 192-197, 206-213, 215-220, 225-231, | | | | |
| | | 249-258, 273-279, 281-287, | | | | |
| | | 300-306, 313-319, 323-332, 335-341, | | | | |
| | | 344-351, 360-382, 407-431, | | | | |
| | | 443-448, 459-468, 475-496, 513-520, | | | | |
| | | 522-537, 543-550, 556-565, | | | | |
| | | 567-573, 580-585, 593-615, 619-631, | | | | |
| | | 633-642, 670-686, 688-698, | | | | |
| | | 759-766, 768-782, 799-808, 842-848, | | | | |
| | | 868-877, 879-917, 945-950, | | | | |
| | | 979-988, 996-1002, 1025-1036, | | | | |
| | | 1065-1084, 1101-1107, 1113-1119, | | | | |
| | | 1125-1142, 1163-1169, 1183-1189, | | | | |
| | | 1213-1219, 1289-1301, 1307-1315, | | | | |
| | | 1331-1342, 1369-1378, 1385-1391, | | | | |
| | | 1410-1419, 1421-1427, 1433-1447, | | | | |
| | | 1468-1475, 1487-1494, 1518-1529, | | | | |
| | | 1564-1570, 1592-1609, 1675-1681, | | | | |
| | | 1686-1693, 1714-1725, 1740-1747, | | | | |
| | | 1767-1774, 1793-1807, 1824-1841, | | | | |
| | | 1920-1937, 1953-1958, 1972-1978, | | | | |
| | | 1980-1986, 1997-2011, 2048-2066, | | | | |
| | | 2161-2166, 2219-2224, 2252-2257, | | | | |
| | | 2292-2298, 2375-2380, 2394-2399, | | | | |
| | | 2435-2440, 2449-2468 | | | | |
| ORF1848 | Map-ND2C | 4-27, 42-66, 70-76, 102-107, 113-118, | E: 5 | aa 75-90 | E: GSBZB15(75-90): 6/41 | 202, 221 |
| | protein | 133-138 | | | | |
| ORF1891 | ribosomal protein | 31-39, 48-54, 61-67, 75-83, 90-98, | F: 4 | aa 239-257 | F: SALAV36(239-257): 19/41 | 203, 222 |
| | L2 (rplB) | 103-119, 123-145, 160-167, 169-176, | | | | |
| | | 182-193, 195-206, 267-273 | | | | |
| ORF2011 | Putative drug | 5-27, 79-85, 105-110, 138-165, 183-202, | D: 5 | aa 205-224 | D: n.d. | 311, 339 |
| | transporter | 204-225, 233-259, 272-292, | | | | |
| | | 298-320, 327-336, 338-345, 363-376, | | | | |
| | | 383-398, 400-422, 425-470, | | | | |
| | | 489-495, 506-518, 536-544, 549-554, | | | | |
| | | 562-568, 584-598, 603-623 | | | | |
| ORF2027 | lactase permease, | 10-33, 38-71, 73-103, 113-125, 132-147, | E: 2 | aa 422-436 | E: GSBZF58(422-436): 6/41 | 204, 223 |
| | putative | 154-163, 170-216, 222-248, | | | | |
| | | 250-269, 271-278, 287-335, 337-355, | | | | |
| | | 360-374, 384-408, 425-442, | | | | |
| | | 453-465, 468-476, 478-501, 508-529 | | | | |
| ORF2087 | Hemolysin II | 8-27, 52-59, 73-80, 90-99, 104-110, | D: 3 | aa 126-147 | D: n.d. | 312, 340 |
| | (putative) | 117-124, 131-140, 189-209, 217-232, | | | | |
| | | 265-279, 287-293, 299-306 | | | | |
| ORF2090 | preLukS | 8-26, 75-82, 118-126, 136-142, 163-177, | F: 2 | aa 270-284 | F: SALAQ77(270-284): 23/41 | 205, 224 |
| | | 182-189, 205-215, 221-236, | | | | |
| | | 239-248, 268-274 | | | | |
| ORF2092 | Hemolysin II | 5-22, 30-47, 58-65, 75-81, 87-92, | F: 3 | aa 238-253 | F: SALAQ67(237-252): 10/41 | 206, 225 |
| | (preLUK-F) | 99-105, 107-113, 119-126, 189-195, | | | | |
| | | 217-223, 234-244, 250-257, 266-272 | | | | |
| ORF2107 | Multidrug | 10-28, 30-43, 50-75, 80-113, 116-125, | D: 9 | aa 54-104 | D: n.d. | 313, 341 |
| | resistance protein | 136-167, 170-191, 197-245, | | | | |
| | (putative) | 253-329, 345-367, 375-396 | | | | |
| ORF2192 | Transcriptional | 20-31, 46-52, 55-69, 74-79, 89-97, | D: 3 | aa 15-35 | D: n.d. | 314, 342 |
| | regulator GntR | 108-113, 120-128, 141-171, 188-214 | | | | |
| | family, putative | | | | | |
| ORF2305 | Amino acid | 25-79, 91-103, 105-127, 132-149, | D: 53 | aa 363-393 | D: n.d. | 315, 343 |
| | permease | 158-175, 185-221, 231-249, 267-293, | | | | |
| | | 307-329, 336-343, 346-359, | | | | |
| | | 362-405, 415-442, 446-468 | | | | |
| ORF2324 | Citrate | 10-77, 85-96, 99-109, 111-138, 144-155, | D: 7 | aa 37-83 | D: n.d. | 316, 344 |
| | dransporter | 167-176, 178-205, 225-238, | | | | |
| | | 241-247, 258-280, 282-294, 304-309, | | | | |
| | | 313-327, 333-383, 386-402, | | | | |
| | | 405-422, 429-453 | | | | |
| ORF2422 | Anion transporter | 7-26, 28-34, 36-53, 55-73, 75-81, | D: 16 | aa 275-295 | D: n.d. | 317, 345 |
| | family protein | 87-100, 108-117, 121-138, 150-160, | | | | |
| | | 175-181, 184-195, 202-215, 221-247, | | | | |
| | | 265-271, 274-314, 324-337, | | | | |
| | | 341-412, 414-423, 425-440, 447-462, | | | | |
| | | 464-469 | | | | |
| ORF2553 | SirA | 5-22, 54-78, 97-103, 113-123, 130-148, | D: 3 | aa 1-22 | D: n.d. | 318, 346 |
| | | 166-171, 173-180, 192-201, | | | | |
| | | 254-261, 266-272, 310-322 | | | | |
| ORF2555 | omithine cyclode- | 20-35, 37-50, 96-102, 109-120, 123-137, | E: 2 | aa 32-48 | E: GSBZB37(32-48): 11/41 | 207, 226 |
| | aminase | 141-150, 165-182, 206-224, | | | | |
| | | 237-256, 267-273, 277-291, 300-305, | | | | |
| | | 313-324 | | | | |
| ORF2558 | Multidrug | 11-63, 79-129, 136-191, 209-231, | D: 8 | aa 84-100 | D: n.d. | 319, 347 |
| | resistance | 237-250, 254-276, 282-306, 311-345, | | | | |
| | efflux proten, | 352-373, 376-397 | | | | |
| | putative | | | | | |
| ORF2610 | Cap5M | 4-30, 34-40, 79-85, 89-98, 104-118, | D: 13 | aa 114-141 | D: n.d. | 320, 348 |
| | | 124-139, 148-160, 167-178 | | | | |
| ORF2613 | Cap5P (UDP-N- | 4-9, 17-24, 32-38, 44-54, 68-82, | B: 3, F: 11 | aa 321-341 | F: SALAU27(325-337): 9/41 | 208, 227 |
| | acetyl- | 89-95, 101-120, 124-131, 136-142, | | | | |
| | glucosamine | 145-157, 174-181, 184-191, 196-204, | | | | |
| | 2-epimerase) | 215-224, 228-236, 243-250, | | | | |
| | | 259-266, 274-281, 293-301, 314-319, | | | | |
| | | 325-331, 355-367, 373-378 | | | | |
| ORF2628 | Hypothetical | 9-15, 28-36, 44-62, 69-88, 98-104, | F: 6 | aa 694-708 | F: SALBD82(1288-1303): 9/41 | 209, 228 |
| | protein | 111-136, 139-149, 177-186, 195-217, | | aa 790-800 | | |
| | | 224-236, 241-257, 260-278, | | aa 1288- | | |
| | | 283-290, 292-373, 395-408, 411-443, | | 1305 | | |
| | | 465-472, 475-496, 503-520, | | | | |
| | | 552-559, 569-589, 593-599, 607-613, | | | | |
| | | 615-636, 648-654, 659-687, | | | | |
| | | 689-696, 721-733, 738-759, 783-789, | | | | |
| | | 795-801, 811-823, 827-836, | | | | |
| | | 839-851, 867-875, 877-883, 890-898, | | | | |
| | | 900-908, 912-931, 937-951, | | | | |
| | | 961-992, 994-1002, 1005-1011, | | | | |
| | | 1016-1060, 1062-1074, 1088-1096, | | | | |
| | | 1101-1123, 1137-1153, 1169-1192, | | | | |
| | | 1210-1220, 1228-1239, 1242-1251, | | | | |
| | | 1268-1275, 1299-1311, 1322-1330, | | | | |
| | | 1338-1361, 1378-1384, 1393-1412, | | | | |
| | | 1419-1425, 1439-1459, 1469-1482, | | | | |
| | | 1489-1495, 1502-1519, 1527-1544, | | | | |
| | | 1548-1555, 1600-1607, 1609-1617, | | | | |
| | | 1624-1657, 1667-1691, 1705-1723, | | | | |
| | | 1727-1742, 1749-1770, 1773-1787, | | | | |
| | | 1804-1813, 1829-1837, 1846-1852, | | | | |
| | | 1854-1864, 1869-1879, 1881-1896, | | | | |
| | | 1900-1909, 1922-1927, 1929-1935, | | | | |
| | | 1942-1962, 1972-2005, 2009-2029, | | | | |
| | | 2031-2038, 2055-2076, 2101-2114, | | | | |
| | | 2117-2124, 2147-2178, 2188-2202, | | | | |
| | | 2209-2217, 2224-2230, 2255-2266, | | | | |
| | | 2271-2280, 2282-2302, 2307-2316, | | | | |
| | | 2319-2324, 2379-2387 | | | | |
| ORF2644 | PTS system, | 8-15, 24-30, 49-68, 80-93, 102-107, | F: 4 | aa 106-159 | F: SALAW60(106-125): 3/41 | 210, 229 |
| | sucrose- | 126-147, 149-168, 170-180, 185-193, | | | | |
| | specific | 241-305, 307-339, 346-355, | | | | |
| | IIBC component | 358-372, 382-390, 392-415, 418-425, | | | | |
| | | 427-433, 435-444, 450-472 | | | | |
| ORF2654 | Oligopeptide | 5-61, 72-84, 87-99, 104-109, 124-145, | D: 5 | aa 182-209 | D: n.d. | 321, 349 |
| | ABC transporter, | 158-170, 180-188, 190-216, | | | | |
| | putative | 223-264, 270-275, 296-336, 355-372 | | | | |
| ORF2662 | maltose ABC | 4-21, 71-79, 99-105, 110-121, 143-161, | F: 1 | aa 306-323 | F: SALBC05(306-323): 2/41 | 211, 230 |
| | transporter, | 199-205, 219-235, 244-258, | | | | |
| | putative | 265-270, 285-291, 300-308, 310-318, | | | | |
| | | 322-328, 346-351, 355-361, | | | | |
| | | 409-416 | | | | |
| ORF2710 | sorbitol | 4-12, 19-40, 61-111, 117-138, 140-153, | B: 2, F: 4 | aa 244-257 | F: SALAX93(249-256): 6/41 | 212, 231 |
| | dehydrogenase | 161-180, 182-207, 226-235, | | | | |
| | | 237-249, 253-264, 267-274, 277-292, | | | | |
| | | 311-323 | | | | |
| ORF2742 | Hypothetical | 4-41, 49-56, 61-67, 75-82, 88-104, | D: 188, | aa 303-323 | D: n.d. | 322, 350 |
| | protein | 114-125, 129-145, 151-165, 171-178, | H: 4 | | | |
| | | 187-221, 224-230, 238-250, | | | | |
| | | 252-275, 277-304, 306-385 | | | | |
| ORF2780 | brnQ | 4-29, 41-63, 74-95, 97-103, 107-189, | D: 3 | aa 26-40 | D: n.d. | 323, 351 |
| | | 193-209, 220-248, 260-270, | | | | |
| | | 273-299, 301-326, 328-355, 366-397, | | | | |
| | | 399-428 | | | | |
| ORF2806 | Phage related | 10-17, 23-29, 31-37, 54-59, 74-81, | F: 3 | aa 104-116 | F: SALBC34: 1/1 | 213, 232 |
| | protein | 102-115, 127-137, 145-152, 158-165, | | | | |
| | | 178-186, 188-196, 203-210, | | | | |
| | | 221-227, 232-237 | | | | |
| ORF2900 | Conserved | 4-27, 34-43, 62-73, 81-90, 103-116, | D: 24 | aa 360-376 | D: n.d. | 324, 352 |
| | hypothetical | 125-136, 180-205, 213-218, 227-235, | | | | |
| | protein | 238-243, 251-259, 261-269, | | | | |
| | | 275-280, 284-294, 297-308, 312-342, | | | | |
| | | 355-380, 394-408, 433-458, | | | | |
| | | 470-510, 514-536, 542-567 | | | | |
| ORF2931 | conserved | 4-19, 43-54, 56-62, 84-90, 96-102, | E: 6 | aa 22-37 | E: GSBZA13(22-37): 7/41 | 214, 233 |
| | hypothetical | 127-135, 157-164, 181-187 | | | | |
| | protein | | | | | |
| ORF2958 | Exotoxin 2 | 7-19, 26-39, 44-53, 58-69, 82-88, | F: 1 | aa 154-168 | F: SALBB59(154-168): 4/41 | 215, 234 |
| | | 91-107, 129-141, 149-155, 165-178, | | | | |
| | | 188-194 | | | | |
| ORF2970 | Surface protein, | 9-23, 38-43, 55-60, 69-78, 93-101, | H: 5 | aa 1-70 | H: GSBYU66: n.d. | 399, 400 |
| | putative | 103-112, 132-148, 187-193, 201-208, | | | | |
| | | 216-229, 300-312, 327-352, | | | | |
| | | 364-369, 374-383, 390-396, 402-410, | | | | |
| | | 419-426, 463-475, 482-491 | | | | |

Bacterial surface display: A, LSA250/1 library in fhuA with patient sera 1 (655); B, LSA50/6 library in lamB with patient sera 1 (484); C, LSA250/1 library in fhuA with IC sera 1 (571); E, LSA50/6 library in lamB with IC sera 2 (454); F, LSA50/6 library in lamB with patient sera P1 (1105); G, LSA50/6 library in lamb with IC sera 1 (471); H, LSA250/1 library in fhuA with patient sera 1 (IgA, 708).
Ribosome display: D, LSA250/1 library with IC sera (1686).
**prediction of antigenic sequences longer than 5 amino acids was performed with the programme ANTIGENIC (Kolaskar and Tongaonkar, 1990).
ORF, open reading frame;
CRF, reading frame on complementary strand;
ARF, alternative reading frame.

[0249] TABLE 2c
Immunogenic proteins identified by bacterial surface
and ribosome display: S. epidermidis.

| | | | No. of | | | |
|---|---|---|---|---|---|---|
| | | | selected | Location of | | |
| S. | | | clones | identified | | Seq ID |
| epidermidis | | | per ORF | Immuno- | | no: |
| antigenic | Putative function | | and | genic | Serum reactivity with relevant | (DNA + |
| protein | (by homology) | predicted immunogenic aa** | screen | region | region (positive/total) | Prot) |
| ARF0172 | cation-transporting | 4-34, 37-43 | D: 6 | aa 3-32 | D: nd | 497, 548 |
| | ATPase, E1-E2 | | | | | |
| | family | | | | | |
| ARF0183 | condensing enzyme, | 4-22, 24-49 | D: 4 | aa 1-52 | D: nd | 498, 549 |
| | putative, | | | | | |
| | FabH-related | | | | | |
| ARF2455 | NADH | 4-29 | D: 3 | aa 1-22 | D: nd | 499, 550 |
| | dehydrogenase, | | | | | |
| | putative | | | | | |
| CRF0001 | Unknown | 4-14, 16-26 | D: 3 | aa 5-21 | D: nd | 500, 551 |
| CRF0002 | Unknown | 4-13, 15-23, 36-62 | D: 5 | aa 21-70 | D: nd | 501, 552 |
| CRF0003 | Unknown | 4-12, 14-28 | D: 3 | aa 4-31 | D: nd | 502, 553 |
| CRF0004 | Unknown | 5-15, 35-71, 86-94 | D: 4 | aa 31-72 | D: nd | 503, 554 |
| CRF0005 | Unknown | 8-26, 28-34 | D: 3 | aa: 9-33 | D: nd | 504, 555 |
| CRF0006 | Unknown | 4-11, 15-28 | D: 3 | aa 10-22 | D: nd | 505, 556 |
| CRF0007 | Unknown | 4-19, 30-36 | D: 3 | aa 7-44 | D: nd | 506, 557 |
| CRF0008 | Unknown | 10-48 | D: 4 | aa: 9-44 | D: nd | 507, 558 |
| CRF0009 | Unknown | 41883 | D: 3 | aa 5-14 | D: nd | 508, 559 |
| CRF0192 | Putative protein | 4-23, 25-68 | C: 4 | aa 15-34 | C: GSBBM10(15-34): n.d. | 445, 446 |
| CRF0275 | Putative protein | 4-40, 49-65 | B: 5 | aa 35-68 | B: SELAK28(35-68): n.d. | 447, 448 |
| CRF0622 | Putative protein | 4-12, 17-57, 62-70, 75-84, 86-100 | C: 4 | aa 75-99 | C: GSBBR74(76-99): n.d. | 449, 450 |
| CRF0879 | Putative protein | 4-14, 38-44 | A: 3, | aa 9-40 | B: SELAC39(10-40): n.d. | 451, 452 |
| | | | B: 10 | | | |
| CRF1004 | Putative protein | 4-40 | A: 3, B: 5 | aa 29-65 | B: SELAI63(35-63): n.d. | 453, 454 |
| CRF2248 | Putative protein | 4-10, 19-40, 53-64, 74-91 | C: 30 | aa 74-111 | C: GSBBN64(16-35): n.d. | 455, 456 |
| CRF2307 | Putative protein | 4-19, 35-41, 80-89 | A: 19 | aa 41-87 | A: SEFAL47(41-87): n.d. | 457, 458 |
| CRF2309 | Putative protein | 15-21 | B: 6 | aa 4-16 | B: SELAL02(4-16): n.d. | 459, 460 |
| CRF2409 | Putative protein | 6-25 | B: 6 | aa 2-24 | B: SELAB48(5-24): n.d. | 461, 462 |
| ORF0005 | hypothetical protein | 13-27, 33-67, 73-99, 114-129, 132-158, | D: 3 | aa 105-128 | D: nd | 509, 560 |
| | | 167-190, 193-234, 237-267, | | | | |
| | | 269-299, 316-330, 339-351, 359-382, | | | | |
| | | 384-423 | | | | |
| ORF0008 | Streptococcal | 9-14, 16-24, 26-32, 41-50, 71-79, | B: 2 | aa 895-926 | B: SELAF79(895-926): 7/12 | 239, 268 |
| | hemagglutinin | 90-96, 177-184, 232-237, 271-278, | | | | |
| | | 293-301, 322-330, 332-339, 349-354, | | | | |
| | | 375-386, 390-396, 403-409, | | | | |
| | | 453-459, 466-472, 478-486, 504-509, | | | | |
| | | 518-525, 530-541, 546-552, | | | | |
| | | 573-586, 595-600, 603-622, 643-660, | | | | |
| | | 668-673, 675-681, 691-697, | | | | |
| | | 699-711, 713-726, 732-749, 753-759, | | | | |
| | | 798-807, 814-826, 831-841, | | | | |
| | | 846-852, 871-878, 897-904, 921-930, | | | | |
| | | 997-1003, 1026-1031, 1033-1039, | | | | |
| | | 1050-1057, 1069-1075, 1097-1103, | | | | |
| | | 1105-1111, 1134-1139, 1141-1147, | | | | |
| | | 1168-1175, 1177-1183, 1205-1211, | | | | |
| | | 1213-1219, 1231-1237, 1241-1247, | | | | |
| | | 1267-1273, 1304-1309, 1311-1317, | | | | |
| | | 1329-1335, 1339-1345, 1347-1353, | | | | |
| | | 1382-1389, 1401-1407, 1411-1417, | | | | |
| | | 1447-1453, 1455-1461, 1483-1489, | | | | |
| | | 1491-1497, 1527-1533, 1545-1551, | | | | |
| | | 1556-1561, 1581-1587, 1591-1597, | | | | |
| | | 1627-1638, 1661-1667, 1684-1689, | | | | |
| | | 1691-1697, 1708-1715, 1719-1725, | | | | |
| | | 1765-1771, 1813-1820, 1823-1830, | | | | |
| | | 1835-1856 | | | | |
| ORF0038 | extracellular | 6-25, 29-35, 39-45, 64-71, 82-88, | C: 6 | aa 136-165 | C: GSBBN08(136-165): 1/1 | 353, 359 |
| | elastase precursor | 96-102, 107-113, 119-131, 170-176, | | | | |
| | | 186-192, 196-202, 215-220, 243-248, | | | | |
| | | 302-312, 345-360, 362-371, | | | | |
| | | 378-384, 458-470, 478-489, 495-504 | | | | |
| ORF0099 | hypothetical | 6-18, 31-37, 42-49, 51-67, 73-85, | D: 5 | aa 218-265 | D: nd | 510, 561 |
| | protein | 87-93, 102-109, 119-126, 150-157, | | | | |
| | | 170-179, 185-191, 204-214, 217-223, | | | | |
| | | 237-248, 269-275, 278-316, | | | | |
| | | 320-340, 359-365 | | | | |
| ORF0101 | hypothetical | 4-10, 15-27, 67-94, 123-129, 167-173, | D: 18 | aa 26-109 | D: nd | 511, 562 |
| | protein | 179-184, 187-198, 217-222, | | | | |
| | | 229-235, 238-246 | | | | |
| ORF0121 | C4-dicarboxylate | 4-20, 24-62, 73-86, 89-106, 110-122, | D: 5 | aa 323-379 | D: nd | 512, 563 |
| | transporter, | 131-164, 169-193, 204-213, | | | | |
| | anaerobic, | 219-236, 252-259, 263-281, 296-306, | | | | |
| | putative | 318-324, 328-352, 356-397, | | | | |
| | | 410-429 | | | | |
| ORF0143 | amino acid | 25-79, 91-103, 105-127, 132-150, | D: 35 | aa 247-339 | D: nd | 513, 564 |
| | permease | 157-174, 184-206, 208-219, 231-249, | | | | |
| | | 267-294, 310-329, 336-343, | | | | |
| | | 346-405, 417-468 | | | | |
| ORF0162 | Immunodominant | 4-27, 35-45, 52-68, 83-89, 113-119, | A: 11, | aa 90-227 | B: SELAA19(100-118): 1/1 | 240, 269 |
| | Antigen A | 133-150, 158-166, 171-176, 198-204, | B: 11; | | B: SELAE24(170-190): 11/12 | |
| | | 219-230 | C: 153 | | | |
| ORF0201 | capa protein, | 10-17, 27-53, 81-86, 98-105, 126-135, | D: 9 | aa 11-53 | D: nd | 514, 565 |
| | putative | 170-176, 182-188, 203-217, | | | | |
| | | 223-232, 246-252, 254-269, 274-280, | | | | |
| | | 308-314 | | | | |
| ORF0207 | Ribokinase (rbsK) | 5-11, 15-23, 47-55, 82-90, 98-103, | B: 10 | aa 20-45 | B: SELAQ30 (20-45): 12/12 | 241, 270 |
| | | 108-114, 126-132, 134-156, 161-186, | | | | |
| | | 191-197, 210-224, 228-235, | | | | |
| | | 239-248, 258-264, 275-290 | | | | |
| 0RF0288 | LrgB | 7-28, 34-56, 68-119, 127-146, 149-180, | D: 4 | aa 112-149 | D: nd | 515, 566 |
| | | 182-189, 193-200, 211-230 | | | | |
| ORF0304 | Herpesvirus | 8-16, 30-36, 83-106, 116-122, 135-143, | D: 8 | aa 69-117 | D: nd | 516, 567 |
| | saimiri ORF73 | 152-165, 177-188, 216-225 | | | | |
| | homolog, putative | | | | | |
| ORF0340 | nitrate transporter | 7-21, 24-93, 101-124, 126-139, | D: 5 | aa 238-309 | D: nd | 517, 595 |
| | | 141-156, 163-179, 187-199, 202-242, | | | | |
| | | 244-261, 267-308, 313-322, | | | | |
| | | 340-353, 355-376 | | | | |
| ORF0346 | hypothetical protein | 8-27, 65-73, 87-93, 95-105 | D: 8 | aa 1-29 | D: nd | 518, 568 |
| ORF0355 | conserved | 5-30, 37-43, 57-66, 85-94, 103-111, | C: 5 | aa 63-86 | C: GSBBL39(63-86): 1/1 | 354, 360 |
| | hypothetical | 118-125 | | | | |
| | protein | | | | | |
| ORF0356 | conserved | 4-14, 21-53, 60-146, 161-173, 175-182, | D: 5 | aa 51-91 | D: nd | 519, 569 |
| | hypothetical protein | 190-198, 200-211 | | | | |
| ORF0406 | hypothetical protein | 12-32, 35-63, 68-102, 106-137, | D: 19 | aa 1-48, | D: nd | 520, 570 |
| | | 139-145, 154-168, 173-185, 203-222, | | aa 69-102 | | |
| | | 230-259, 357-364, 366-374 | | | | |
| ORF0425 | amino acid | 40-58, 75-86, 93-110, 117-144, | D: 3 | aa 401-440 | D: nd | 521, 571 |
| | permease | 150-173, 199-219, 229-260, 264-300, | | | | |
| | | 317-323, 329-356, 360-374, | | | | |
| | | 377-390, 392-398, 408-424, 427-452 | | | | |
| ORF0442 | SceB precursor | 7-22, 42-48, 55-66, 83-90, 109-118, | C: 38 | aa 60-102 | C: GSBBM60(65-84): 1/1 | 355, 361 |
| | | 136-141 | | | | |
| ORF0448 | SsaA precursor | 6-25, 39-47, 120-125, 127-135, | C: 170 | aa 15-208 | C: GSBBN58(81-105): 1/1 | 356, 362 |
| | | 140-148, 157-168, 200-208, 210-220, | | | C: GSBBL13(167-184): 1/1 | |
| | | 236-243, 245-254 | | | C: GSBBL25(22-45): 1/1 | |
| ORF0503 | Ribosomal protein | 31-39, 48-54, 61-67, 75-83, 90-98, | A: 1, B: 3 | aa 212-273 | B: SELAA47(238-259): 12/12 | 242, 271 |
| | L2 | 103-115, 123-145, 160-167, 169-176, | | | | |
| | | 182-193, 195-206, 267-273 | | | | |
| ORF0551 | Conserved | 5-25, 29-36, 45-53, 62-67, 73-82, | A: 16, | aa 162-213 | B: SELAL12(164-197): 8/12 | 243, 272 |
| | hypothetical protein | 84-91, 99-105, 121-142, 161-177, | B: 9 | | | |
| | | 187-193, 203-224, 242-251, 266-271, | | | | |
| | | 278-285 | | | | |
| ORF0556 | hypothetical protein | 4-24, 30-41, 43-68, 82-90, 107-114, | D: 3 | aa 1-26 | D: nd | 522, 596 |
| | | 123-143, 155-168 | | | | |
| ORF0623 | Fumble, putative | 10-17, 32-38, 55-72, 77-84, 88-96, | A: 10, | aa 95-150 | B: SELAB86(95-128): 3/12 | 244, 273 |
| | | 126-134, 152-160, 176-185, 190-203, | B: 12; | | | |
| | | 208-214, 217-225, 233-252, | C: 1 | | | |
| | | 257-262 | | | | |
| ORF0740 | Hypothetical protein | 18-24, 47-61, 69-83, 90-96, 125-132, | B: 3 | aa 1093- | B: SELAB23(1097-1114): 7/12 | 245, 274 |
| | | 140-163, 171-188, 222-249, | | 1114 | | |
| | | 281-296, 305-315, 322-330, 335-351, | | | | |
| | | 354-368, 390-397, 411-422, | | | | |
| | | 424-431, 451-469, 479-485, 501-507, | | | | |
| | | 517-524, 539-550, 560-568, | | | | |
| | | 588-599, 619-627, 662-673, 678-689, | | | | |
| | | 735-742, 744-749, 780-786, | | | | |
| | | 797-814, 821-827, 839-847, 857-863, | | | | |
| | | 866-876, 902-911, 919-924, | | | | |
| | | 967-982, 1005-1015, 1020-1026, | | | | |
| | | 1062-1070, 1078-1090, 1125-1131, | | | | |
| | | 1145-1150, 1164-1182, 1208-1213, | | | | |
| | | 1215-1234, 1239-1251, 1256-1270, | | | | |
| | | 1298-1303, 1316-1325, 1339-1349, | | | | |
| | | 1362-1369, 1373-1384, 1418-1427, | | | | |
| | | 1440-1448, 1468-1475, 1523-1532, | | | | |
| | | 1536-1542, 1566-1573, 1575-1593, | | | | |
| | | 1603-1619, 1626-1636, 1657-1667, | | | | |
| | | 1679-1687, 1692-1703, 1711-1718, | | | | |
| | | 1740-1746, 1749-1757, 1760-1769, | | | | |
| | | 1815-1849, 1884-1890, 1905-1914, | | | | |
| | | 1919-1925, 1937-1947, 1955-1963, | | | | |
| | | 1970-1978, 2003-2032, 2075-2089, | | | | |
| | | 2117-2124, 2133-2140, 2146-2151, | | | | |
| | | 2161-2167, 2173-2179, 2184-2196, | | | | |
| | | 2204-2220, 2244-2254, 2259-2264, | | | | |
| | | 2285-2296, 2300-2318, 2328-2334, | | | | |
| | | 2347-2354, 2381-2388, 2396-2408, | | | | |
| | | 2419-2446, 2481-2486, 2493-2500, | | | | |
| | | 2506-2516, 2533-2540, 2555-2567, | | | | |
| | | 2576-2592, 2599-2606, 2615-2639, | | | | |
| | | 2647-2655 | | | | |
| ORF0757 | hypothetical | 13-20, 22-28, 33-40, 60-76, 79-86, | C: 6 | aa 260-284 | C: GSBBN01(260-284): 1/1 | 357, 363 |
| | protein | 90-102, 112-122, 129-147, 157-170, | | | | |
| | | 178-185, 188-193, 200-205, 218-228, | | | | |
| | | 234-240, 243-250, 265-273, | | | | |
| | | 285-291, 310-316, 330-348, 361-380, | | | | |
| | | 399-405, 427-446, 453-464 | | | | |
| ORF0912 | DNA mismatch | 9-16, 28-39, 47-56, 69-76, 104-121, | A: 25 | aa 242-304 | SEFAT31(242-290): n.d. | 441, 442 |
| | repair protein | 124-130, 137-144, 185-195, 199-214, | | | | |
| | | 238-243, 293-307, 317-337, | | | | |
| | | 351-370, 385-390, 411-428, 472-488, | | | | |
| | | 498-516, 518-525, 528-535, | | | | |
| | | 538-545, 553-559, 563-568, 579-588, | | | | |
| | | 592-607, 615-622, 632-638, | | | | |
| | | 641-648, 658-674, 676-705, 709-720, | | | | |
| | | 727-739, 742-750, 753-760, | | | | |
| | | 768-773, 783-788, 811-819, 827-838 | | | | |
| ORF0923 | GTP-binding | 4-10, 18-27, 42-55, 64-72, 77-92, | B: 13 | aa 144-163 | B: SELAD55(151-163): 8/12 | 246, 275 |
| | protein | 114-126, 132-157, 186-196, 206-217, | | | | |
| | | 236-243, 257-280, 287-300, | | | | |
| | | 306-312, 321-328, 338-351, 360-367, | | | | |
| | | 371-382, 385-399 | | | | |
| ORF0979 | Conserved | 4-28, 44-51, 53-84, 88-107, 113-192 | A: 9, | aa 12-51 | B: SELAH01(26-49): 5/12 | 247, 276 |
| | hypothetical protein | | B: 18 | | | |
| ORF0982 | sodium/alanine | 13-21, 24-50, 73-84, 91-118, 126-133, | D: 3 | aa 277-305 | D: nd | 523, 572 |
| | symporter(alsT) | 142-149, 156-175, 189-249, | | | | |
| | | 251-273, 294-332, 339-347, 358-381, | | | | |
| | | 393-413, 425-448, 458-463 | | | | |
| ORF1230 | Signal peptidase I | 6-33, 44-59, 61-69, 74-82, 92-98, | D: 14 | aa 1-53 | D: nd | 524, 573 |
| | | 133-146, 163-175 | | | | |
| ORF1232 | Exonuclease | 4-12, 16-32, 36-48, 50-65, 97-127, | B: 6 | aa 188-219 | B: SELAA13(188-216): n.d. | 443, 444 |
| | RexA | 136-142, 144-165, 176-190, 196-202, | | | | |
| | | 211-222, 231-238, 245-251, | | | | |
| | | 268-274, 280-286, 305-316, 334-356, | | | | |
| | | 368-376, 395-402, 410-417, | | | | |
| | | 426-440, 443-449, 474-486, 499-508, | | | | |
| | | 510-525, 540-549, 568-576, | | | | |
| | | 608-617, 624-639, 646-661, 672-678, | | | | |
| | | 688-703, 706-717, 727-734, | | | | |
| | | 743-755, 767-773, 783-797, 806-814, | | | | |
| | | 830-839, 853-859, 863-871, | | | | |
| | | 877-895, 899-918, 935-948, 976-990, | | | | |
| | | 998-1007, 1020-1030, 1050-1062, | | | | |
| | | 1070-1077, 1111-1125, 1137-1149, | | | | |
| | | 1153-1160, 1195-1211 | | | | |
| ORF1284 | permease PerM, | 10-60, 72-96, 103-109, 127-133, | D: 27 | aa 55-106 | D: nd | 525, 574 |
| | putative | 146-177, 182-189, 196-271, 277-289, | | | | |
| | | 301-319, 323-344, 347-354 | | | | |
| ORF1319 | 2-oxoglutarate | 9-31, 36-45, 59-67, 71-81, 86-94, | B: 5; C: 1 | aa 400-413 | B: SELAF54(404-413): 11/12 | 248, 277 |
| | decarboxylase | 96-107, 111-122, 127-140, 153-168, | | | | |
| | (menD) | 180-211, 218-224, 226-251, 256-270, | | | | |
| | | 272-289, 299-305, 310-323, | | | | |
| | | 334-341, 345-353, 358-364, 369-379, | | | | |
| | | 384-390, 396-410, 417-423, | | | | |
| | | 429-442, 454-464, 470-477, 497-505, | | | | |
| | | 540-554 | | | | |
| ORF1326 | autolysin AtlE | 6-25, 40-46, 75-81, 150-155, 200-205, | B: 7; C: 5 | aa 1282- | B: SELAD20(1282-1298): | 249, 278 |
| | (lytD) | 237-243, 288-295, 297-306, | | 1298 | 10/12 | |
| | | 308-320, 341-347, 356-363, 384-391, | | | | |
| | | 417-429, 440-452, 465-473, | | | | |
| | | 481-514, 540-546, 554-560, 565-577, | | | | |
| | | 585-590, 602-609, 611-617, | | | | |
| | | 625-634, 636-643, 661-668, 676-684, | | | | |
| | | 718-724, 734-742, 747-754, | | | | |
| | | 766-773, 775-781, 785-798, 800-807, | | | | |
| | | 825-832, 840-857, 859-879, | | | | |
| | | 886-892, 917-923, 950-956, 972-978, | | | | |
| | | 987-1002, 1028-1035, 1049-1065, | | | | |
| | | 1071-1099, 1111-1124, 1150-1172, | | | | |
| | | 1185-1190, 1196-1207, 1234-1241, | | | | |
| | | 1261-1271, 1276-1281, 1311-1320, | | | | |
| | | 1325-1332 | | | | |
| ORF1333 | quinol oxidase | 4-27, 33-55, 66-88 | D: 4 | aa 3-93 | D: nd | 526, 575 |
| | polypeptide iv (ec | | | | | |
| | 1.9.3.—) (quinol | | | | | |
| | oxidase aa 3-600, | | | | | |
| | subunit qoxd) | | | | | |
| ORF1356 | hypothetical protein | 9-36, 44-67, 74-97, 99-149, 161-181, | D: 32 | aa 54-95 | D: nd | 527, 597 |
| | | 189-198, 211-224, 245-253, | | | | |
| | | 267-273, 285-290, 303-324, 342-394, | | | | |
| | | 396-427 | | | | |
| ORF1373 | dihydrolipoamide | 33-39, 42-78, 103-109, 126-136, | A: 3, B: 1 | aa 124-188 | A: SEFAP57(124-188): 2/12 | 250, 279 |
| | acetyltransferase | 184-191, 225-232, 258-279, 287-294, | | | | |
| | | 306-315, 329-334, 362-379, | | | | |
| | | 381-404, 425-430 | | | | |
| ORF1381 | hypothetical protein | 21-45, 62-67, 74-106, 108-142, | D: 5 | aa 7-44 | D: nd | 528, 576 |
| | | 154-160, 230-236, 245-251, 298-305 | | | | |
| ORF1420 | Muts2 protein, | 8-32, 34-41, 46-55, 70-76, 81-89, | B: 7 | aa 581-608 | B: SELAM40(581-604): 9/12 | 251, 280 |
| | putative | 97-115, 140-148, 153-159, 165-171, | | | | |
| | | 175-188, 207-239, 256-276, 280-289, | | | | |
| | | 297-319, 321-335, 341-347, | | | | |
| | | 352-360, 364-371, 384-411, 420-440, | | | | |
| | | 449-460, 495-502, 505-516, | | | | |
| | | 560-566, 573-588, 598-605, 607-614, | | | | |
| | | 616-624, 674-694, 702-717 | | | | |
| ORF1443 | cell division | 61-66, 111-117, 148-155, 173-182, | D: 4 | aa 175-229 | D: nd | 529, 577 |
| | protein (divIB) | 194-224, 263-293, 297-303, 313-321, | | | | |
| | | 334-343, 345-356, 375-381, | | | | |
| | | 384-395, 408-429, 448-454 | | | | |
| ORF1500 | Cell division protein | 100-107, 154-167, 182-193, 200-206, | A: 2, B: 3 | aa 77-182 | B: SELAP37(139-162): 9/12 | 252, 281 |
| | FtsY | 223-231, 233-243, 249-257, | | | | |
| | | 265-273, 298-310, 326-336, 343-362, | | | | |
| | | 370-384 | | | | |
| ORF1665 | amino acid ABC | 4-25, 44-55, 66-76, 82-90, 93-99, | D: 5 | aa 1-52 | D: nd | 530, 578 |
| | transporter, | 104-109, 176-209, 227-242, 276-283, | | | | |
| | permease protein | 287-328, 331-345, 347-376, | | | | |
| | | 400-407, 409-416, 418-438, 441-474 | | | | |
| ORF1707 | putative host cell | 12-31, 40-69, 129-137, 140-151, | D: 4 | aa 20-76 | D: nd | 531, 598 |
| | surface-exposed | 163-171, 195-202, 213-218 | | | | |
| | lipoprotein | | | | | |
| ORF1786 | D-3- | 4-10, 16-32, 45-55, 66-78, 87-95, | D: 5 | aa 400-442 | D: nd | 532, 579 |
| | phosphoglycerate | 103-115, 118-124, 135-150, 154-161, | | | | |
| | dehydrogenase, | 166-174, 182-193, 197-207, | | | | |
| | putative | 225-231, 252-261, 266-304, 310-315, | | | | |
| | | 339-347, 351-359, 387-402, | | | | |
| | | 411-423, 429-436, 439-450, 454-464, | | | | |
| | | 498-505, 508-515 | | | | |
| ORF1849 | yhjN protein | 8-51, 53-69, 73-79, 85-132, 139-146, | D: 5 | aa 254-301 | D: nd | 533, 580 |
| | | 148-167, 179-205, 212-224, | | | | |
| | | 231-257, 264-293, 298-304, 309-317, | | | | |
| | | 322-351 | | | | |
| ORF1877 | protein-export | 6-19, 26-39, 41-51, 59-67, 72-85, | D: 7 | aa 367-409 | D: nd | 534, 581 |
| | membrane protein | 91-98, 104-111, 120-126, 147-153, | | | | |
| | SecD (secD-1) | 158-164, 171-178, 199-209, 211-218, | | | | |
| | | 233-249, 251-257, 269-329, | | | | |
| | | 362-368, 370-385, 392-420, 424-432, | | | | |
| | | 454-489, 506-523, 534-539, | | | | |
| | | 550-556, 563-573, 576-596, 603-642, | | | | |
| | | 644-651, 655-666, 685-704, | | | | |
| | | 706-733, 747-753 | | | | |
| ORF1912 | unknown conserved | 23-35, 37-70, 75-84, 90-112, 129-135, | D: 4 | aa 131-187 | D: nd | 535, 582 |
| | protein | 137-151, 155-180, 183-209, | | | | |
| | (conserved) | 211-217, 219-225, 230-248, 250-269, | | | | |
| | | 274-284, 289-320, 325-353, | | | | |
| | | 357-371, 374-380, 384-399, 401-411, | | | | |
| ORF2015 | Trehalose-6- | 8-17, 30-54, 82-89, 94-103, 157-166, | A: 3, B: 8 | aa 465-498 | B: SELAH62(465-498): 5/12 | 253, 282 |
| | phosphate | 178-183, 196-204, 212-219, | | | | |
| | hydrolase | 222-227, 282-289, 297-307, 345-364, | | | | |
| | | 380-393, 399-405, 434-439, | | | | |
| | | 443-449, 453-475, 486-492, 498-507, | | | | |
| | | 512-535, 538-548 | | | | |
| ORF2018 | Glucose-6- | 4-16, 21-27, 39-51, 60-69, 76-83, | B: 17 | aa 250-287 | B: SELAI19(250-279): 3/12 | 254, 283 |
| | phosphate 1-DH | 97-118, 126-132, 159-167, 171-177, | | | | |
| | | 192-204, 226-240, 247-259, 281-286, | | | | |
| | | 294-305, 314-320, 330-338, | | | | |
| | | 353-361, 367-372, 382-392, 401-413, | | | | |
| | | 427-434, 441-447, 457-463 | | | | |
| ORF2040 | LysM domain | 51-56, 98-108, 128-135, 138-144, | D: 23 | aa 259-331 | D: nd | 536, 583 |
| | protein protein | 152-158, 177-192, 217-222, 232-251, | | | | |
| | | 283-305, 406-431, 433-439 | | | | |
| ORF2098 | PilB related | 13-18, 36-43, 45-50, 73-79, 95-100, | A: 60 | aa 1-57 | A: SEFAQ50(15-57): 5/12 | 255, 284 |
| | protein | 111-126, 133-139 | | | | |
| ORF2139 | sodium: sulfate | 7-12, 22-97, 105-112, 121-128, | D: 41 | aa 42-118 | D: nd | 537, 584 |
| | symporter family | 130-146, 152-164, 169-189, 192-203, | | | | |
| | protein, putative | 211-230, 238-246, 260-281, | | | | |
| | | 304-309, 313-325, 327-357, 367-386, | | | | |
| | | 398-444, 447-476, 491-512 | | | | |
| ORF2172 | SceB precursor | 4-23, 28-34, 38-43, 45-51, 63-71, | A: 438, | aa 6-215 | B: SELAH53(188-209): 3/12 | 256, 285 |
| | (lytE) | 85-96, 98-112, 118-126, 167-174, | B: 40, | | | |
| | | 179-185, 219-228, 234-239, 256-263 | D: 4 | | | |
| ORF2200 | zinc ABC | 4-31, 33-40, 48-64, 66-82, 92-114, | D: 19 | aa 162-225 | D: nd | 538, 585 |
| | transporter, | 118-133, 137-159, 173-246, 248-266 | | | | |
| | permease protein, | | | | | |
| | putative | | | | | |
| ORF2248 | membrane protein, | 4-11, 17-34, 72-78, 127-137, 178-227, | D: 17 | aa 1-59, | D: nd | 539, 586 |
| | MmpL family, | 229-255, 262-334, 352-380, | | aa 159-225, | | |
| | putative | 397-405, 413-419, 447-454, 462-467, | | aa 634-674 | | |
| | | 478-490, 503-509, 517-558, | | | | |
| | | 560-568, 571-576, 582-609, 623-629, | | | | |
| | | 631-654, 659-710, 741-746, | | | | |
| | | 762-767, 771-777, 788-793, 856-867 | | | | |
| ORF2260 | Unknown conserved | 5-10, 18-29, 31-37, 66-178, 196-204, | B: 4 | aa 123-142 | B: SELAG77(123-142): 12/12 | 257, 286 |
| | protein in | 206-213 | | | | |
| | others | | | | | |
| ORF2282 | conserved | 16-22, 41-50, 52-64, 66-74, 89-95, | A: 4 | aa 51-97 | A: SEFAR88(51-97): 3/12 | 258, 287 |
| | hypothetical protein | 107-114, 123-130, 135-159, 167-181, | | | | |
| | | 193-199, 223-231, 249-264, | | | | |
| | | 279-289 | | | | |
| ORF2376 | DivIC homolog, | 27-56, 102-107, 111-116 | D: 7 | aa 15-58 | D: nd | 540, 587 |
| | putative | | | | | |
| ORF2439 | membrane-bound | 4-9, 11-26, 36-56, 59-73, 83-100, | A: 459, | aa 10-217 | B: SELAC31(75-129): 12/12 | 259, 288 |
| | lytic murein | 116-130, 148-163, 179-193, 264-270, | B: 2, | | | |
| | transglycosidase | 277-287, 311-321 | D: 53 | | | |
| | D, putative | | | | | |
| ORF2493 | conserved | 4-29, 37-77, 80-119 | D: 6 | aa 69-113 | D: nd | 541, 588 |
| | hypothetical protein | | | | | |
| ORF2535 | ATP-binding | 5-28, 71-81, 101-107, 128-135, | D: 8 | aa 1-65 | D: nd | 542, 589 |
| | cassette | 146-52, 178-188, 209-214, 224-233, | | | | |
| | transporter-like | 279-294, 300-306, 318-325, 342-347, | | | | |
| | protein, putative | 351-357 | | | | |
| ORF2627 | cation- | 8-31, 34-80, 125-132, 143-153, | D: 3 | aa 61-105 | D: nd | 543, 590 |
| | transporting | 159-165, 176-189, 193-198, 200-206, | | | | |
| | ATPase, E1-E2 | 215-242, 244-262, 264-273, | | | | |
| | family, putative | 281-289, 292-304, 318-325, 327-338, | | | | |
| | | 347-371, 404-416, 422-429, | | | | |
| | | 432-450, 480-488, 503-508, 517-525, | | | | |
| | | 539-544, 551-562, 574-587, | | | | |
| | | 600-631, 645-670 | | | | |
| ORF2635 | Hypothetical | 4-10, 17-24, 26-42, 61-71, 90-96, | A: 2, B: 2 | aa 139-169 | B: SELAB63(138-163): 7/12 | 260, 289 |
| | protein | 102-111, 117-125, 158-164, 173-182, | | | | |
| | | 193-201, 241-255, 268-283, | | | | |
| | | 289-298, 305-319, 340-353, 360-376, | | | | |
| | | 384-390, 394-406 | | | | |
| ORF2669 | Hypothetical | 4-21, 35-42, 85-90, 99-105, 120-125, | A: 14, | aa 22-81 | B: SELAE27(22-51): 5/12 | 261, 290 |
| | protein | 148-155, 175-185, 190-196, | B: 8 | | | |
| | | 205-210, 217-225 | | | | |
| ORF2671 | Hypothetical protein | 4-23, 43-49, 73-84, 93-98, 107-113, | A: 44, | aa 23-68 | B: SELAD21(36-61): 5/12 | 262, 291 |
| | | 156-163, 179-190, 197-204, 208-218, | B: 14 | | | |
| | | 225-231, 248-255 | | | | |
| ORF2673 | Hypothetical | 4-20, 65-71, 99-105, 148-155, 171-182, | A: 16, | aa 23-68 | B: SELAE25(23-54): 2/12 | 263, 292 |
| | protein | 190-196, 204-210, 221-228, | B: 3 | | | |
| | | 240-246 | | | | |
| ORF2694 | Hypothetical | 4-26, 93-98, 121-132, 156-163, | A: 19, | aa 25-82 | B: SELAB26(27-60): 5/12 | 264, 293 |
| | protein | 179-192, 198-204, 212-220, 225-238 | B: 30 | | | |
| ORF2695 | Hypothetical | 4-26, 43-50, 93-98, 107-113, 156-163, | A: 7 | aa 22-78 | A: SEFAH77(22-66): 6/12 | 265, 294 |
| | protein | 179-190, 198-204, 212-218, | | | | |
| | | 225-231, 247-254 | | | | |
| ORF2719 | two-component | 5-52, 60-71, 75-84, 91-109, 127-135, | B: 4 | aa 123-132 | B: SELAA62(123-132): 6/12 | 266, 295 |
| | sensor histidine | 141-156, 163-177, 185-193, | | | | |
| | kinase, putative | 201-214, 222-243, 256-262, 270-279, | | | | |
| | | 287-293, 298-303, 321-328, | | | | |
| | | 334-384, 390-404, 411-418, 427-435, | | | | |
| | | 438-448, 453-479, 481-498, | | | | |
| | | 503-509 | | | | |
| ORF2728 | Accumulation- | 4-13, 36-44, 76-86, 122-141, 164-172, | A: 265, | aa 803-1001 | B: SELAA10(850-878): 11/12 | 267, 296 |
| | associated protein | 204-214, 235-242, 250-269, | B: 448; | | | |
| | | 291-299, 331-337, 362-369, 377-396, | C: 4, D: 9 | | | |
| | | 419-427, 459-469, 505-524, | | | | |
| | | 547-555, 587-597, 618-625, 633-652, | | | | |
| | | 675-683, 715-727, 740-753, | | | | |
| | | 761-780, 803-811, 842-853, 962-968, | | | | |
| | | 1006-1020 | | | | |
| ORF2740 | lipase precursor | 4-21, 190-200, 218-228, 233-241, | C: 3 | aa 110-177 | C: GSBBL80(110-177): 1/1 | 358, 364 |
| | | 243-261, 276-297, 303-312, 316-325, | | | | |
| | | 346-352, 381-387, 436-442, | | | | |
| | | 457-462, 495-505, 518-532, 543-557, | | | | |
| | | 574-593 | | | | |
| ORF2764 | oligopeptide ABC | 14-36, 62-131, 137-147, 149-162, | D: 4 | aa 6-41 | D: nd | 544, 591 |
| | transporter, | 164-174, 181-207, 212-222, 248-268, | | | | |
| | permease protein, | 279-285 | | | | |
| | putative | | | | | |
| ORF2767 | unknown conserved | 7-20, 22-35, 40-50, 52-61, 63-92, | D: 4 | aa 276-316 | D: nd | 545, 592 |
| | protein in | 94-101, 103-126, 129-155, 161-178, | | | | |
| | others | 192-198, 200-208, 210-229, 232-241, | | | | |
| | | 246-273, 279-332, 338-359, | | | | |
| | | 369-383 | | | | |
| ORF2809 | sodium: sulfate | 4-29, 37-53, 56-82, 87-100, 108-117, | D: 9 | aa 266-317, | D: nd | 546, 593 |
| | symporter family | 121-138, 150-160, 175-180, | | aa 357-401 | | |
| | protein | 189-195, 202-214, 220-247, 269-315, | | | | |
| | | 324-337, 341-355, 361-412, | | | | |
| | | 414-423, 425-440, 447-467 | | | | |
| ORF2861 | putative | 7-13, 20-32, 37-90, 93-103, 107-126, | D: 11 | aa 137-185 | D: nd | 547, 594 |
| | transmembrane | 129-155, 159-173, 178-189, | | | | |
| | efflux rotein | 195-221, 234-247, 249-255, 268-303, | | | | |
| | | 308-379 | | | | |

Bacterial surface display: A, LSE150 library in fhuA with patient sera 2 (957); B, LSE70 library in lamB with patient sera 2 (1420); C, LSE70 library in lamB with patient sera 1 (551).
Ribosome display: D, LSE150 in pMAL4.31 with P2 (1235).
**prediction of antigenic sequences longer than 5 amino acids was performed with the programme ANTIGENIC (Kolaskar and Tongaonkar, 1990).
ORF, open reading frame;
ARF, alternative reading frame;
CRF, reading frame on complementary strand.
ORF, open reading frame;
CRF, reading frame on complementary strand.

[0250] TABLE 2d
Immunogenic proteins identified by bacterial surface
and ribosome display: S. aureus (new annotation)

| | | | | No. of | Location of | | |
|---|---|---|---|---|---|---|---|
| S. | | Putative | | selected | Identified | | Seq |
| aureus | Old | function | | clones per | immuno- | | ID no: |
| antigenic | ORF | (by | | ORF and | genic | Serum reactivity with relevant | (DNA + |
| protein | number | homology) | predicted immunogenic aa** | screen | region | region (positive/total) | Prot) |
| SaA0003 | ORF2967 | repC | 7-19, 46-57, 85-91, 110-117, 125-133, | B: 3, C: 14; | aa 9-42 | C: GSBYI53(9-42): 1/1 | 394, |
| | & | | 140-149, 156-163, 198-204, | F: 29 | aa 156-241 | C: GSBYG39(156-241): 1/1 | 396 |
| | ORF2963 | | 236-251, 269-275, 283-290, 318-323, | | aa 300-314 | C: GSBYM94(343-420): 26/30 | |
| | | | 347-363 | | aa 343-420 | | |
| ORF0123 | ORF1909 | unknown | 4-10, 25-30, 38-57, 91-108, 110-123, | B: 3, E: 7, | aa 145-163 | B: GSBXF80(150-163): 5/27 | 409, |
| | ˜18 aa at | | 125-144, 146-177, 179-198, | G: 1 | | E: GSBZC17(150-163): 25/41 | 410 |
| | N- | | 216-224, 226-233 | | | | |
| | terminus | | | | | | |
| ORF0160 | ORF1941 | unknown | 4-26, 34-70, 72-82, 86-155, 160-166, | A: 1 | aa 96-172 | A: GSBXO07(96-172): 5/30 | 411, |
| | −16 aa at | | 173-205, 207-228, 230-252, | | | | 412 |
| | N- | | 260-268, 280-313 | | | | |
| | terminus | | | | | | |
| ORF0657 | ORF | LPXTGVI | 9-33, 56-62, 75-84, 99-105, 122-127, | A: 2, B: 27, | aa 526-544 | B: GSBXE07-bdb1(527-542): | 413, |
| | unknown | protein | 163-180, 186-192, 206-228, | F: 15 | | 11/71 | 414 |
| | | | 233-240, 254-262, 275-283, 289-296, | | | F: SALAX70(526-544): 11/41 | |
| | | | 322-330, 348-355, 416-424, | | | | |
| | | | 426-438, 441-452, 484-491, 541-549, | | | | |
| | | | 563-569, 578-584, 624-641 | | | | |
| ORF1050 | ORF1307 | unknown | 45-68, 72-79, 91-101, 131-142, | A: 1, H: 45 | aa 53-124 | A: GSBXM26(53-124): 7/30 | 415, |
| | −4 aa at | | 144-160, 179-201 | | | | 416 |
| | N- | | | | | | |
| | terminus | | | | | | |
| ORF1344 | ORF0212 | NifS | 13-26, 40-49, 61-68, 92-112, 114-123, | A: 11 | aa24-84 | A: GSBXK59-bmd21(24-84): | 417, |
| | −10 aa at | protein | 138-152, 154-183, 194-200, | | | 6/29 | 418 |
| | N- | homolog | 207-225, 229-240, 259-265, 271-284, | | | | |
| | terminus | | 289-309, 319-324, 330-336, | | | | |
| | | | 346-352, 363-372 | | | | |
| ORF1632 | ORF1163 | SdrH | 4-31, 50-55, 243-257, 259-268, | B: 6, E: 11, | aa 101-115 | B: GSBXG53(164-182): 39/71 | 419, |
| | −4 aa at | homolog | 298-316, 326-335, 364-370, 378-407 | F: 34 | aa 115-139 | F: SALAP07(101-115): 11/41 | 420 |
| | N- | | | | aa 158-186 | | |
| | terminus | | | | | | |
| ORF2180 | ORF0594 | LPXTGIV | 9-17, 24-45, 67-73, 82-90, 100-107, | A: 3, C: 3, | aa 491-587 | A: GSBXS61(491-555): 1/1 | 421, |
| | −2 aa at | protein | 117-134, 137-145, 158-168, 176-183, | E: 6, F: 2, | aa 633-715 | A: GSBXL64(494-585): 1/1 | 422 |
| | N- | | 188-194, 206-213, 223-231, | H: 6 | aa 702-757^{#} | A: GSBXS92(758-841): 1/1 | |
| | terminus | | 243-248, 263-270, 275-282, 298-304, | | aa 758-830 | A: bmd4(702-757): 16/30^{#} | |
| | | | 344-355, 371-377, 382-388, | | (aa | (A: bmd4(830-885): 16/30)^{#} | |
| | | | 427-433, 469-479, 500-505, 534-559, | | 830-885)^{#} | F: SALBC43(519-533): 4/41 | |
| | | | 597-607, 662-687, 790-815, | | | | |
| | | | 918-943, 1032-1037, 1046-1060, | | | | |
| | | | 1104-1112, 1128-1137, 1179-1184, | | | | |
| | | | 1197-1204, 1209-1214, 1221-1239 | | | | |
| ORF2184 | ORF0590 | FnbpB | 10-29, 96-116, 131-137, 146-158, | A: 2, C: 4, | aa 694-769 | A: GSBXM62(694-769): 28/28 | 423, |
| | −8 aa at | | 167-173, 177-182, 185-191, 195-201, | G: 9 | aa 774-847 | A: GSBXR22(774-847): 1/1 | 424 |
| | N- | | 227-236, 260-266, 270-284, | | | | |
| | terminus | | 291-299, 301-312, 348-356, 367-376, | | | | |
| | | | 382-396, 422-432, 442-453, | | | | |
| | | | 480-487, 497-503, 519-527, 543-548, | | | | |
| | | | 559-565, 579-585, 591-601, | | | | |
| | | | 616-623, 643-648, 657-663, 706-718, | | | | |
| | | | 746-758, 791-796, 810-817, | | | | |
| | | | 819-825, 833-839, 847-853, 868-885, | | | | |
| | | | 887-895, 919-932 | | | | |
| ORF2470 | ORF0299 | Conserved | 4-27, 36-42, 49-55, 68-73, 94-101, | C: 3 | aa 400-441 | C: GSBYH60(400-441): 28/31 | 425, |
| | −14 aa at | hypo- | 131-137, 193-200, 230-235, 270-276, | | | | 426 |
| | N- | thetical | 294-302, 309-324, 334-344, | | | | |
| | terminus | protein | 347-364, 396-405, 431-437, 498-508, | | | | |
| | | | 513-519, 526-532, 539-544, | | | | |
| | | | 547-561, 587-594, 618-630, 642-653, | | | | |
| | | | 687-699, 713-719, 752-766 | | | | |
| ORF2498 | ORF0267 | Conserved | 8-19, 21-44, 63-76, 86-92, 281-286, | D: 12, F: 6 | aa 358-411 | D: 17/21 | 427, |
| | ORF app. | hypo- | 303-322, 327-338, 344-354, 364-373, | | aa 588-606 | F: SALAT38(895-909): 8/41 | 428 |
| | 580 aa | thetical | 379-394, 405-412, 453-460, | | aa 895-909 | | |
| | longer at | protein | 501-506, 512-518, 526-542, 560-570, | | | | |
| | N | | 577-583, 585-604, 622-630, | | | | |
| | terminus; | | 645-673, 677-691, 702-715, 727-741, | | | | |
| | plus | | 748-753, 770-785, 789-796, | | | | |
| | other | | 851-858, 863-869, 876-881, 898-913, | | | | |
| | changes | | 917-924, 979-986, 991-997, | | | | |
| | | | 1004-1009, 1026-1041, 1045-1052, | | | | |
| | | | 1107-1114, 1119-1125, 1132-1137, | | | | |
| | | | 1154-1169, 1173-1192, 1198-1204, | | | | |
| | | | 1240-1254, 1267-1274, 1290-1298, | | | | |
| | | | 1612-1627 | | | | |
| ORF2548 | ORF2711 | IgG | 4-37, 44-53, 65-71, 75-82, 105-112, | A: 55, | aa 1-123 | A: GSBXK68(1-73): 21/30 | 429, |
| | −12 aa at | binding | 126-132, 136-143, 164-170, 184-190, | B: 54, | aa 207-273 | A: GSBXK41(35-123): 1/1 | 430 |
| | N- | protein | 194-201, 222-232, 242-248, | C: 35, | aa 310-410 | A: GSBXN38(207-273): 19/30 | |
| | terminus | A | 252-259, 280-291, 300-317, 413-420, | F: 59, | | A: GSBXL11(310-363): 10/30 | |
| | | | 452-460, 485-503 | G: 56, | | B: GSBXB22(394-406): 37/71 | |
| | | | | H: 38 | | F: SALAM17(394-406): 29/41 | |
| ORF2746 | ORF2507 | homology | 4-9, 12-17, 40-46, 91-103, 106-113, | A: 1, H: 13 | aa 63-126 | A: GSBXO40(66-123): 8/29 | 431, |
| | −3 aa at | with | 116-125, 150-160, 172-177, 182-188, | | | | 432 |
| | N- | ORF1 | 195-206, 241-261, 263-270, | | | | |
| | terminus | | 277-285, 287-294 | | | | |
| ORF2797 | ORF2470 | unknown | 13-32, 40-75, 82-95, 97-112, 115-121, | B: 3, E: 2, | aa 159-176 | B: GSBXE85(159-176): 11/27 | 433, |
| | −24 aa at | | 124-154, 166-192, 201-225, | F: 13, H: 3 | aa 325-339 | F: SALAQ47(159-176): 8/41 | 434 |
| | N- | | 227-252, 268-273, 288-297, 308-375, | | | | |
| | terminus | | 379-434 | | | | |
| ORF2960 | ORF2298 | putative | 8-31, 35-44, 106-113, 129-135, | C: 101, | aa 1-80 | C: GSBYG32(1-80): 6/7 | 435, |
| | −5 aa at | Exotoxin | 154-159, 168-178, 203-215, 227-236, | E: 2, H: 58 | aa 48-121 | C: GSBYG61-bhe2(48-116): | 436 |
| | N- | | 240-249, 257-266, 275-281, | | aa 98-190 | 26/30 | |
| | terminus | | 290-296, 298-305, 314-319, 327-334 | | | C: GSBYN80(98-190):: 13/17 | |
| ORF2963 | ORF2295 | putative | 8-23, 35-41, 64-70, 81-87, 109-115, | C: 3, E: 3, | aa 17-95 | C: GSBYJ58(17-95): 9/15 | 437, |
| | −5 aa at | Exotoxin | 121-132, 150-167, 177-188, 194-201, | G: 1 | | | 438 |
| | N- | | 208-216, 227-233, 238-248, | | | | |
| | terminus | | 265-271, 279-285 | | | | |
| ORF3200 | ORF1331 | putative | 8-32, 45-52, 92-103, 154-159, 162-168, | A: 11, | aa | A: GSBXL07(8543-8601): 6/28 | 439, |
| | +8506 aa | extra- | 207-214, 232-248, 274-280, | B: 11, | 8543-8601 | | 440 |
| | at N- | cellular | 297-303, 343-349, 362-375, 425-442, | C: 36, | aa | | |
| | terminus | matrix | 477-487, 493-498, 505-512, | H: 32 | 8461-8475 | | |
| | | binding | 522-533, 543-550, 558-564, 568-574, | | | | |
| | | protein | 580-600, 618-630, 647-652, | | | | |
| | | | 658-672, 692-705, 711-727, 765-771, | | | | |
| | | | 788-798, 812-836, 847-858, | | | | |
| | | | 870-898, 903-910, 1005-1015, | | | | |
| | | | 1018-1025, 1028-1036, 1058-1069, | | | | |
| | | | 1075-1080, 1095-1109, 1111-1117, | | | | |
| | | | 1119-1133, 1166-1172, 1183-1194, | | | | |
| | | | 1200-1205, 1215-1222, 1248-1254, | | | | |
| | | | 1274-1280, 1307-1317, 1334-1340, | | | | |
| | | | 1381-1391, 1414-1420, 1429-1439, | | | | |
| | | | 1445-1467, 1478-1495, 1499-1505, | | | | |
| | | | 1519-1528, 1538-1550, 1557-1562, | | | | |
| | | | 1572-1583, 1593-1599, 1654-1662, | | | | |
| | | | 1668-1692, 1701-1707, 1718-1724, | | | | |
| | | | 1738-1746, 1757-1783, 1786-1793, | | | | |
| | | | 1806-1812, 1815-1829, 1838-1848, | | | | |
| | | | 1853-1860, 1875-1881, 1887-1893, | | | | |
| | | | 1899-1908, 1933-1940, 1952-1961, | | | | |
| | | | 1964-1970, 1977-1983, 1990-1996, | | | | |
| | | | 2011-2018, 2025-2038, 2086-2101, | | | | |
| | | | 2103-2117, 2177-2191, 2195-2213, | | | | |
| | | | 2220-2225, 4*2237-2249, 2273-2279, | | | | |
| | | | 2298-2305, 2319-2327, 2349-2354, | | | | |
| | | | 2375-2381, 2391-2398, 2426-2433, | | | | |
| | | | 2436-2444, 2449-2454, 2463-2469, | | | | |
| | | | 2493-2499, 2574-2589, 2593-2599, | | | | |
| | | | 2605-2611, 2615-2624, 2670-2684, | | | | |
| | | | 2687-2698, 2720-2727, 2734-2754, | | | | |
| | | | 2762-2774, 2846-2866, 2903-2923, | | | | |
| | | | 2950-2956, 2985-2998, 3011-3031, | | | | |
| | | | 3057-3064, 2*3102-3117, | | | | |
| | | | 3137-3143, 3186-3195, 3211-3219, | | | | |
| | | | 3255-3270, 3290-3300, 3327-3334, | | | | |
| | | | 3337-3343, 3390-3396, 3412-3419, | | | | |
| | | | 3439-3446, 3465-3470, 3492-3500, | | | | |
| | | | 3504-3510, 3565-3573, 3642-3650, | | | | |
| | | | 3691-3698, 3766-3775, 3777-3788, | | | | |
| | | | 3822-3828, 3837-3847, 3859-3864, | | | | |
| | | | 3868-3879, 3895-3902, 3943-3951, | | | | |
| | | | 3963-3971, 3991-3997, 4018-4030, | | | | |
| | | | 4054-4060, 4074-4099, 4123-4129, | | | | |
| | | | 4147-4153, 4195-4201, 4250-4255, | | | | |
| | | | 4262-4267, 4270-4277, 4303-4310, | | | | |
| | | | 4321-4330, 4343-4352, 4396-4408, | | | | |
| | | | 4446-4451, 4471-4481, 4503-4509, | | | | |
| | | | 4516-4534, 4596-4604, 4638-4658, | | | | |
| | | | 4698-4710, 4719-4732, 4776-4783, | | | | |
| | | | 4825-4833, 4851-4862, 4882-4888, | | | | |
| | | | 4894-4909, 4937-4942, 5047-5054, | | | | |
| | | | 5094-5100, 5102-5112, 5120-5125, | | | | |
| | | | 5146-5153, 5155-5164, 5203-5214, | | | | |
| | | | 5226-5236, 5278-5284, 5315-5321, | | | | |
| | | | 5328-5342, 5348-5359, 5410-5420, | | | | |
| | | | 5454-5466, 5481-5489, 5522-5538, | | | | |
| | | | 5597-5602, 5607-5614, 0″5623-5929, | | | | |
| | | | 5650-5665, 5707-5719, 5734-5742, | | | | |
| | | | 5772-5778, 5785-5790, 5833-5845, | | | | |
| | | | 5857-5863, 5899-5904, 5908-5921, | | | | |
| | | | 5959-5971, 5981-5989, 6010-6017, | | | | |
| | | | 6034-6043, 6058-6064, 6112-6120, | | | | |
| | | | 6154-6169, 6210-6217, 6231-6240, | | | | |
| | | | 6261-6268, 6288-6294, 6318-6324, | | | | |
| | | | 6340-6349, 6358-6369, 6402-6407, | | | | |
| | | | 6433-6438, 6483-6493, 6513-6519, | | | | |
| | | | 6527-6546, 6561-6574, 6599-6608, | | | | |
| | | | 6610-6616, 6662-6673, 6696-6705, | | | | |
| | | | 6729-6743, 6769-6775, 6792-6801, | | | | |
| | | | 6819-6828, 6840-6846, 6860-6870, | | | | |
| | | | 6915-6928, 6966-6972, 7021-7028, | | | | |
| | | | 7032-7047, 7096-7101, 7109-7117, | | | | |
| | | | 7138-7149, 7157-7162, 7201-7206, | | | | |
| | | | 7238-7253, 7283-7294, 7296-7302, | | | | |
| | | | 7344-7365, 7367-7376, 7389-7404, | | | | |
| | | | 7413-7433, 7475-7482, 7493-7500, | | | | |
| | | | 7535-7549, 7596-7608, 7646-7651, | | | | |
| | | | 7661-7678, 7722-7731, 7741-7754, | | | | |
| | | | 7764-7769, 7776-7782, 7791-7806, | | | | |
| | | | 7825-7837, 7862-7875, 7891-7897, | | | | |
| | | | 7922-7931, 7974-7981, 7999-8005, | | | | |
| | | | 8039-8045, 8049-8065, 8070-8075, | | | | |
| | | | 8099-8112, 8119-8125, 8151-8158, | | | | |
| | | | 8169-8181, 8226-8232, 8258-8264, | | | | |
| | | | 8291-8299, 8301-8310, 8325-8335, | | | | |
| | | | 8375-8389, 8394-8400, 8405-8412, | | | | |
| | | | 8421-8436, 8478-8485, 8512-8521, | | | | |
| | | | 8528-8538, 8564-8579, 8587-8594, | | | | |
| | | | 8603-8615, 8626-8637, 8640-8646, | | | | |
| | | | 8657-8672, 8684-8691, 8725-8736, | | | | |
| | | | 8748-8761, 8777-8783, 8794-8799, | | | | |
| | | | 8810-8825, 8851-8862, 8874-8887, | | | | |
| | | | 8903-8912, 8914-8926, 8933-8943, | | | | |
| | | | 8954-8960, 8979-8988, 9004-9011, | | | | |
| | | | 9035-9041, 9056-9069, 9077-9086, | | | | |
| | | | 9088-9096, 9106-9111, 9124-9133, | | | | |
| | | | 9183-9191, 9224-9231, 9235-9241, | | | | |
| | | | 9250-9265, 9279-9290, 9295-9300, | | | | |
| | | | 9326-9343, 9408-9414, 9422-9427, | | | | |
| | | | 9435-9441, 9455-9461, 9507-9517, | | | | |
| | | | 9532-9538, 9580-9589, 9594-9600, | | | | |
| | | | 9614-9623, 9643-9648, 9665-9683, | | | | |
| | | | 9688-9700, 9720-9726, 9742-9758, | | | | |
| | | | 9767-9775, 9795-9800, 9817-9835, | | | | |
| | | | 9842-9847, 9912-9919, 9925-9938, | | | | |
| | | | 9943-9963, 9970-10009, | | | | |
| | | | 10025-10031, 10037-10043, | | | | |
| | | | 10045-10063, 10066-10073, | | | | |
| | | | 10117-10124, | | | | |
| | | | 10126-10136, 10203-10210, | | | | |
| | | | 10218-10225, 10232-10242, | | | | |
| | | | 10287-10292, | | | | |
| | | | 10303-10323, 10352-10360, | | | | |
| | | | 10385-10396,10425-10431, | | | | |
| | | | 10452-10459, 10480-10485 | | | | |

Bacterial surface display: A, LSA250/1 library in fhuA with patient sera 1 (655); B, LSA50/6 library in lamB with patient sera 1 (484); C, LSA250/1 library in fhuA with IC sera 1 (571); E, LSA50/6 library in lamB with IC sera 2 (454); F, LSA50/6 library in lamB with patient sera P1 (1105); G, LSA50/6 library in lamb with IC sera 1 (471).
Ribosome display: D, LSA250/1 library with IC sera (1686).
**prediction of antigenic sequences longer than 5 amino acids was performed with the programme ANTIGENIC (Kolaskar and Tongaonkar, 1990);
^{#}identical sequence present twice in ORF.

[0251] TABLE 3
Serological proteome analysis of S. aureus surface
proteins using human sera
a) S. aureus/agr “stress conditions”

| | | | Infant pool | |
|---|---|---|---|---|
| | IC40 | IC35, N26, C4 | C2, 5, 6, 10, 12 | N22 1:10,000 |
| Spot ID/sera | 1:20,000 | 1:50,000 each | 1:10,000 | IC40 1:50,000 |
| PCK2 | + | + | − | + |
| PCK4 | + | +++ | − | +++ |
| PCK5 | − | (+) | − | + |
| PCK6 | + | + | − | + |

| | IC35, 40 | P-pool | Infant pool |
|---|---|---|---|
| | 1:50,000 | (P6, 18, 25, 28, 29) | C2, 5, 6, 10, 12 |
| Spot ID/sera | N22 1:10,000 | 1:50,000 each | 1:10,000 |
| PAC1 | ++ | ++ | − |
| PAC2 | ++ | +++ | − |
| PAC3 | − | + | − |
| PAC5 | − | ++ | − |

| | P-pool | | IC pool/IgG | IC pool/IgA |
|---|---|---|---|---|
| | (P6, 18, 25, 28, 29) | Infant 14 | (N26, IC34, 35) | (N26, IC34, 35) |
| Spot ID/sera | 1:50,000 each | 1:10,000 | 1:30,000 each | 1:30,000 each |
| PAC11 | ++ | − | ++ | ++ |
| PAC12 | ++ | − | ++ | ++ |
| PAC13 | − | − | − | ++ |
| PAC14 | − | − | + | + |
| PAC15 | − | − | +++ | +++ |
| PAC16 | + | − | + | + |
| PAC17 | + | − | + | + |
| PAC18 | ++ | − | − | − |
| PAC19 | − | − | ++ | ++ |
| PAC20 | ++ | − | − | − |
| POV31 | +++ | − | − | − |
| POV32 | + | − | − | − |
| POV33 | + | − | − | − |
| POV34 | + | − | − | − |
| POV35 | + | − | − | − |
| POV36 | + | − | − | − |
| POV37 | ++ | − | − | − |
| POV38 | ++ | − | − | − |
| POV39 | +++ | − | − | − |
| POV40 | +++ | − | − | − |

b) S. aureus/COL “standard conditions”

| | IC pool | | | | | | |
|---|---|---|---|---|---|---|---|
| | (N26, IC34, 35) | IC35 | P18 | P25 | P1 | P29 | Infant 18 |
| Spot ID/sera | 1:30,000 each | 1:20,000 | 1:10,000 | 1:10,000 | 1:5,000 | 1:2,500 | 1:10,000 |
| POV2 | +++ | +++ | +++ | +++ | +++ | − | − |
| POV3.1 | +++ | +++ | +++ | +++ | +++ | − | − |
| POV3.2 | +++ | +++ | +++ | +++ | +++ | − | − |
| POV4 | + | +++ | − | − | − | − | − |
| POV7 | − | − | +++ | − | − | − | − |
| POV10 | − | ++ | (+) | (+) | − | (+) | − |
| POV12 | − | − | − | − | − | +++ | − |
| POV13 | ++ | +++ | +++ | +++ | ++ | ++ | − |
| POV14 | ++ | +++ | +++ | ++ | ++ | ++ | − |
| POV15 | + | + | − | + | (+) | − | − |

c) S. aureus/COL “stress conditions”

| | P-pool | | | | |
|---|---|---|---|---|---|
| | (P6, 18, 25, 28, 29) | IC34 + IC35 | P18 | P29 | Infant 14 |
| Spot ID/sera | 1:50,000 each | 1:20,000 each | 1:10,000 | 1:10,000 | 1:10,000 |
| POV16 | − | +++ | − | − | − |
| POV17 | − | +++ | (+) | − | − |
| POV18 | + | − | ++ | − | − |
| POV19 | (+) | − | +++ | − | − |
| POV21 | − | − | + | − | − |
| POV23 | − | + | − | − | − |
| POV24 | − | + | − | − | − |
| POV25 | + | − | − | − | − |

[0252] TABLE 4
S. aureus antigens identified by MALDI-TOF-MS sequencing
(ORFs in bold were also identified by bacterial surface display)
Prediction of antigenic regions in selected antigens identified
by serological proteome analysis using human sera

| | S. aureus protein | | Seq ID no: | |
|---|---|---|---|---|
| spot ID | (ORF no./abbrev.) | Putative function (by homology) | (DNA, Prot) | Putative localization |
| PCK2 | ORF0599 | Glycinamide —ribosyl synthase | 107, 108 | cytoplasmic |
| PCK5 | ORF0484 yitU | conserved hypoth. protein (yitU) | 109, 110 | cytoplasmic |
| PCK6 | ORF2309 | membrane-associated malate-quinone | 111, 112 | peripheral membrane |
| | mqo | oxidase | | |
| POV2 | ORF0766 aux1 | protein phosphatase contributing to methicilin | 113, 114 | trans-membrane |
| | | resistance | | |
| POV4, 17 | ORF0078 EF- | C-terminal part of 44 kDa protein similar | 115, 116 | cytoplasmic/secreted |
| PAC14, 19 | Tu | to elongation factor Tu | | |
| POV5¹⁾ | ORF0782 | 3-ketoacyl-acyl carrier protein reductase | 117, 118 | cytoplasmic |
| | | (fabG) | | |
| POV7 | ORF0317 SecA | protein transport across the membrane | 39, 91 | cytoplasmic |
| | | SecA | | |
| POV10 | ORF1252 yrzC | hypothetical BACSU 11.9 kd protein | 119, 120 | cytoplasmic |
| | | (upf0074 (rff2) family) | | |
| POV12 | ORF0621 pdhB | dihydrolipoamide acetyltransferase | 121, 122 | cytoplasmic |
| | | (pdhB) | | |
| POV14 | ORF0072 rpoB | DNA-directed RNA polymerase β | 125, 126 | cytoplasmic |
| POV15 | ORF0077 EF-G | 85 kD vitronectin binding protein | 127, 128 | cytoplasmic |
| POV18 | not found | general stress protein YLY1 | 129, 130 | cytoplasmic |
| | YLY1 | | | |
| POV30¹⁾ | ORF0069 RL7 | ribosomal protein L7 | 131, 132 | cytoplasmic |
| POV21 | ORF0103 | probable hexulose-6-phosphate synthase | 133, 134 | cytoplasmic |
| | yckG | (yckG) | | |
| POV24 | ORF0419 | conserved hypothetical protein (yurX) | 137, 138 | cytoplasmic |
| | yurX | | | |
| POV25 | ORF2441 | glucose inhibited division protein a (gidA) | 139, 140 | cytoplasmic |
| | gidA | | | |
| PAC1 | ORF1490 | protein export protein prsa precursor | 173, 174 | periplasmic |
| | prsA | (prsA) | | |
| PAC2 | ORF1931 | periplasmic molybdate binding protein | 175, 176 | surface |
| | ModA | (ModA) | | |
| PAC3 | ORF2053 | heavy metal dependent transcriptional | 177, 178 | cytoplasmic |
| | | activator, putative regulator of multidrug | | |
| | | resistance efflux pump pmrA | | |
| PAC5 | ORF2233 | pyruvate oxidase (ydaP) | 179, 180 | cytoplasmic |
| | ydaP | | | |
| PAC11 | ORF1361 | LPXTGV, extracellularmatrix-bdg. | 3, 56 | surface |
| PAC12 | ORF1244 | alanyl-tRNA synthetase | 159, 160 | cytoplasmic |
| | alaS | | | |
| PAC13 | ORF0835 | RNA processing enzyme/ATP-bdg. | 161, 162 | cytoplasmic |
| | ymfA | | | |
| PAC15 | ORF1124 | lipoamid acyltransferase component of | 163, 164 | cytoplasmic |
| | bfmBB | branched-chain alpha-keto acid dehydrogenase | | |
| | | complex | | |
| PAC16 | ORF0340 | glyceraldehydes-3-phosphate | 165, 166 | cytoplasmic |
| | GAPDH | dehydrogenase | | |
| PAC17 | not found | 5′-methylthioadenosine nucleosidase/ | | cytoplasmic |
| | Contig83 | S-adenosylhomo-cysteine nucleosidase | | |
| PAC20 | ORF2711 | 75% identity to ORF2715 | 167, 168 | unknown |
| | | similar to hypothetical proteins | | |
| POV31 | ORF0659 | 29 kDa surface protein | 236, 238 | surface |
| POV32 | ORF0659 | 29 kDa surface protein | 236, 238 | surface |
| POV33 | ORF0659 | 29 kDa surface protein | 236, 238 | surface |
| POV34 | ORF0659 | 29 kDa surface protein | 236, 238 | surface |
| POV35 | ORF0659 | 29 kDa surface protein | 236, 238 | surface |
| POV36 | ORF00661 | LPXTG-motif cell wall anchor domain | 235, 237 | surface |
| | | protein | | |
| POV37 | ORF0659 | 29 kDa surface protein | 236, 238 | surface |
| POV38 | ORF0659 | 29 kDa surface protein | 236, 238 | surface |
| POV39 | ORF0657 | LPXTG-anchored surface protein | 1, 142 | surface |
| POV40 | not identified | | | |

| Seq ID no: | | S. aureus ORF | | Putative antigenic surface areas |
|---|---|---|---|---|
| (Protein) | spot ID | no./abbrev. | Putative localization | (Antigenic package) |
| 112 | PCK6 | ORF2309 | peripheral | 61-75, 82-87, 97-104, 113-123, 128-133, |
| | | mqo | membrane | 203-216, 224-229, 236-246, 251-258, 271-286, |
| | | | | 288-294, 301-310, 316-329, 337-346, |
| | | | | 348-371, 394-406, 418-435, 440-452 |
| 114 | POV2 | ORF766 aux1 | trans-membrane | 30-37, 44-55, 83-91, 101-118, 121-128, |
| | | | | 136-149, 175-183, 185-193, 206-212, 222-229, |
| | | | | 235-242 |
| 116 | POV4 | ORF078 EF-Tu | cytoplasmic/ | 28-38, 76-91, 102-109, 118-141, 146-153, |
| | | | secreted | 155-161, 165-179, 186-202, 215-221, 234-249, |
| | | | | 262-269, 276-282, 289-302, 306-314, |
| | | | | 321-326, 338-345, 360-369, 385-391 |
| 176 | PAC2 | ORF1931 | periplasmic | 29-44, 74-83, 105-113, 119-125, 130-148, |
| | | ModA | | 155-175, 182-190, 198-211, 238-245 |
| 174 | PAC1 | ORF1490 | periplasmic | 5-24, 38-44, 100-106, 118-130, 144-154, |
| | | prsA | | 204-210, 218-223, 228-243, 257-264, 266-286, |
| | | | | 292-299 |
| 168 | PAC20 | ORF2711 | unknown | 7-14, 21-30, 34-50, 52-63, 65-72, 77-84, |
| | | | | 109-124, 129-152, 158-163, 175-190, 193-216, |
| | | | | 219-234 |

| | GI no. or | S. aureus protein | | Seq ID no: |
|---|---|---|---|---|
| spot ID | TIGR no. | (ORF no./abbrev.) | Putative function (by homology) | (DNA, Prot) |
| PCK2 | TIGR1280 | ORF0599 | Glycinamide-ribosyl synthase | 107, 108 |
| PCK4 | 7672993 | ORF2268 lsaA | possibly adhesion/aggregation | 12, 64 |
| PCK5 | TIGR6209 | ORF0484 yitU | conserved hypoth. protein (yitU) | 109, 110 |
| PCK6 | TIGR6182 | ORF2309 | membrane-associated malate-quinone | 111, 112 |
| | | | oxidase | |
| POV2 | 6434044 | ORF0766 aux1 | protein phosphatase contributing to methicilin | 113, 114 |
| | | | resistance | |
| POV3.1 | 7672993 | ORF2268 lsaA | possibly adhesion/aggregation | 12, 64 |
| POV3.2 | 7672993 | ORF2268 lsaA | possibly adhesion/aggregation | 12, 64 |
| POV4 | TIGR8079 | ORF0078 EF- | C-terminal part of 44 kDa protein similar | 115, 116 |
| | | Tu | to elongation factor Tu | |
| POV5¹⁾ | TIGR8091 | ORF0782 | 3-ketoacyl-acyl carrier protein reductase | 117, 118 |
| | | | (fabG) | |
| POV7 | 2500720 | ORF0317 SecA | protein transport across the membrane | 39, 91 |
| | | | SecA | |
| POV10 | TIGR8097 | ORF1252 yrzC | hypothetical BACSU 11.9 kd protein | 119, 120 |
| | | | (upf0074 (rff2) family) | |
| POV12 | 2499415 | ORF0621 pdhB | dihydrolipoamide acetyltransferase (pdhB) | 121, 122 |
| POV13 | 7470965 | ORF0094 SdrD | fibrinogen-bdg. (LPXTG) protein homolog | 123, 124 |
| | | | (SdrD) | |
| POV14 | 1350849 | ORF0072 rpoB | DNA-directed RNA polymerase β | 125, 126 |
| POV15 | 6920067 | ORF0077 EF-G | 85 kD vitronectin binding protein | 127, 128 |
| POV17 | TIGR8079 | ORF0078 | C-terminal part of 44 kDa protein similar | 115, 116 |
| | | | to elongation factor Tu | |
| POV18 | 3025223 | not found | general stress protein YLY1 | 129, 130 |
| POV30¹⁾ | 350771 | ORF0069 RL7 | ribosomal protein L7 | 131, 132 |
| POV21 | | ORF0103 | probable hexulose-6-phosphate synthase | 133, 134 |
| | | | (yckG) | |
| POV23 | | ORF0182 | lipoprotein (S. epidermis) | 135, 136 |

¹⁾identified from a total lysate from S. aureus 8325-4 spa-grown under standard conditions. Seroreactivity with 1/1 patient and 2/4 normal sera but not with infant serum (C5).

### References

[0253] Aichinger G., Karlsson L., Jackson M.R., Vestberg M., Vaughau J. H., Teyton L., Lechler R. I. and Peterson P A. Major Histocompatibility Complex classli-dependent unfolding, transport and degradation of endogenous proteins. J. Biol. Chem., v.272, 1997, pp. 29127-29136
[0254] Ausubel, F. M., Brent, R., Kingston, R. E., Moore, D. D., Seidman, J. G., Smith, J. A. and Struhl, K. Eds. (1994). Current protocols in molecular biology. John Wiley & Sons, Inc.
[0255] Betley, M. J., Lofdahl, S., Kreiswirth, B. N., Bergdoll, M. S. and Novick, R. P. (1984). Staphylococcal enterotoxin A gene is associated with a variable genetic element. Proc. Natl. Acad. Sci. U.S.A. 81:5179-5183.
[0256] Bruggemann M, Neuberger MS (1996) Immunol. Today 17:391-397
[0257] Burnie, J. P., Matthews, R. C., Carter, T., Beaulieu, E., Donohoe, M., Chapman, C., Williamson, P. and Hodgetts, S. J. (2000). Identification of an immunodominant ABC transporter in methicillin-resistant Staphylococcus aureus infections. Infect. Immun. 68:3200-3209.
[0258] Chen, H. Z. and Zubay, G. (1983). Methods Enzymol. 101:674-690.
[0259] Coloque-Navarro, P., Sbderquist, B., Holmberg, H., Blomqvist, L., Olcen, P., and Möllby, R. (1998) Antibody response in Staphylococcus aureus septicaemia—a prospective study. J. Med. Microbiol. 47, 217-25.
[0260] Crossley, K. B. and Archer G. L., eds. (1997). The Staphylococci in Human Disease. Churchill Livingston Inc.
[0261] Flock, J.-I. (1999). Extracellular-matrix-binding proteins as targets for the prevention of Staphylococcus aureus infections. Molecular Medicine Today 5:532-537.
[0262] Forrer, P., Jung, S. and Pluckthun, A. (1999). Beyond binding: using phage display to select for structure, folding and enzymatic activity in proteins. Curr. Opin. Struct. Biol. 9:514-520.
[0263] Foster, T. J. and Hook, M. (1998). Surface protein adhesins of Staphylococcus aureus. Trends Microbiol. 6:484-488.
[0264] Frenay, H. M. E., Theelen, U. P. G., Schouls, L. M., Vandenbroucke-Grauls, C. M. J. E., Vernoef, J., van Leeuwen, W. J., and Mooi, F. R. (1994). Discrimination of epidemic and nonepidemic methicillin-resistant Staphylococcus aureus on the basis of protein A gene polymorphism. J. Clin. Microbiol. 32:846-847.
[0265] Georgiou, G., Stathopoulos, C., Daugherty, P. S., Nayak, A. R., Iverson, B. L. and Curtiss III, R. (1997). Display of heterologous proteins on the surface of microorganisms: From the screening of combinatorial libraries to live recombinant vaccines. Nature Biotechnology 15:29-34.
[0266] Goh, S.-H., Byrne, S. K., Zhang, J. L., and Chow, A. W. (1992). Molecular typing of Staphylococcus aureus on the basis of coagulase gene polymorphisms. J. Clin. Microbiol. 30:1642-1645.
[0267] Graziano et al. (1995) J. Immunol. 155:4996-5002
[0268] Hammer et al. J. Exp. Med (1995) 181: 1847-1855
[0269] Hanes, J. and Pltckthun, A. (1997). In vitro selection and evolution of functional proteins by using ribosome display. PNAS 94:4937-4942.
[0270] Hashemzadeh-Bonehi, L., Mehraein-Ghomi, F., Mitsopoulos, C., Jacob, J. P., Hennessey, E. S. and Broome-Smith, J. K. (1998). Importance of using lac rather than ara promoter vectors for modulating the levels of toxic gene products in Escherichia coli. Mol. Microbiol. 30:676-678.
[0271] Hryniewicz, W. (1999). Epidemiology of MRSA. Infection 27:S13-16.
[0272] Immler, D., Gremm, D., Kirsch, D., Spengler, B., Presek, P., Meyer, H.E. (1998). Electrophoresis 19:1015-1023.
[0273] Kajava, A. V., Zolov, S. N., Kalinin, A. E. and Nesmeyanova, M. A. (2000). The net charge of the first 18 residues of the mature sequence affects protein translocation across the cytoplasmic membrane of Gram-negative bacteria. J. Bacteriol. 182:2163-2169.
[0274] Kluytmans, J., van Belkum, A. and Verbrugh, H. (1997). Nasal carriage of Staphylococcus aureus: epidemiology, underlying mechanisms, and associated risks. Clin. Microbiol. Rev. 10:505-520.
[0275] Kolaskar, A. S. and Tongaonkar, P. C. (1990). A semi-empirical method for prediction of antigenic determinants on protein antigens. FEBS Lett. 276:172-174.
[0276] Lim, Y., Shin, S. H., Jang, I. Y., Rhee, J. H. and Kim, I. S. (1998). Human transferring-binding protein of Staphylococcus aureus is immunogenic in vivo and has an epitope in common with human transferring receptor. FEMS Microbiol. Letters 166:225-230.
[0277] Lorenz, U., Ohlsen, K., Karch, H., Hecker, M., Thiede, A. and Hacker, J. (2000). Human antibody response during sepsis against targets expressed by methicillin resistant Staphylococcus aureus. FEMS Immunol. Med. Microbiol. 29:145-153.
[0278] Mamo, W., Jonsson, P. and Muller, H. P. (1995). Opsonization of Staphylococcus aureus with a fibronectin-binding protein antiserum induces protection in mice. Microb. Pathog. 19:49-55
[0279] McGuiness B T et al. (1996) Nature Biotech. 14:1149
[0280] Modun, B., Evans, R. W., Joannou, C. L. and Williams, P. (1998). Receptor-mediated recognition and uptake of iron from human transferring by Staphylococcus aureus and Staphylococcus epidermidis midis. Infect. Immun. 66:3591-3596.
[0281] Nilsson, I., Patti, J. M., Bremell, T., Hook, M. and Tarkowski, A. (1998). Vaccination with a Recombinant Fragment of Collagen Adhesin provides Protection against Staphylococcus aureus-mediated Septic Death. J. Clin. Invest. 101:2640-2649.
[0282] Parker, K. C., M. A. Bednarek, and J. E. Coligan (1994) Scheme for ranking potential HLA-A2 binding peptides based on independent binding of individual peptide side-chains. J. Immunol. 152:163.
[0283] Pasquali, C., Fialka, I. & Huber, L. A. (1997). Electrophoresis 18:2573-2581.
[0284] Phillips-Quagliata, J. M., Patel, S., Han, J. K., Arakelov, S., Rao, T. D., Shulman, M. J., Fazel, S., Corley, R. B., Everett, M., Klein, M. H., Underdown, B. J. and Corthesy, B. (2000). The IgA/IgM receptor expressed on a murine B cell lymphoma is poly-Ig receptor. J. Immunol. 165:2544-2555
[0285] Rammensee, Hans-Georg, Jutta Bachmann, Niels Nikolaus Emmerich, Oskar Alexander Bachor, Stefan Stevanovic (1999) SYFPEITHI: database for MHC ligands and peptide motifs. Immunogenetics 50: 213-219
[0286] Recsei P., Kreiswirth, B., O'Reilly, M., Schlievert, P., Gruss, A. and Novick, R. P. (1986). Regulation of exoprotein gene expression in Staphylococcus aureus by agr. Mol. Gen. Genet. 202:58-61.
[0287] Rodi, D.J. and Makowski, L. (1999). Phage-display technology—finding a needle in a vast molecular haystack. Curr. Opin. Biotechnol. 10:87-93.
[0288] Schaffitzel et al., Ribosome display: an in vitro method for selection and evolution of antibodies from libraries; Journal of Immunological Methods 231, 119-135 (1999).
[0289] Sanchez-Campillo, M., Bini, L., Comanducci, M., Raggiaschi, R., Marzocchi, B., Pallini, V. and Ratti, G. (1999). Electrophoresis 20:2269-2279.
[0290] Schmittel A, Xeilholz U, Thiel E, Scheibenbogen C. (2000) Quantification of tumor-specific T lymphocytes with the ELISPOT assay. J Immunother 23(3):289-95
[0291] Sester M, Sester U, Kohler H, Schneider T, Deml L, Wagner R, Mueller-Lantzsch N, Pees H W, Meyerhans A. (2000) Rapid whole blood analysis of virus-specific CD4 and CD8 T cell responses in persistent HIV infection. AIDS 14(17):2653-60.
[0292] Shafer, W. M. and Iandolo, J. J. (1979). Genetics of staphylococcal enterotoxin B in methicillin-resistant isolates of Staphylococcus aureus. Infect. Immun. 25:902-911.
[0293] Shibuya, A., Sakamoto, N., Shimizu, Y., Shibuya, K., Osawa, M., Hiroyama, T., Eyre, H. J., Sutherland, G. R., Endo, Y., Fujita, T., Miyabayashi, T., Sakano, S., Tsuji, T., Nakayama, E., Phillips, J. H., Lanier, L. L. and Nakauchi, H. (2000). Fcₐ/_{g} receptor mediates endocytosis of IgM-coated microbes. Nature Immunology 1:441-446.)
[0294] Skerra, A. (1994). Use of the tetracycline promoter for the tightly regulated production of a murine antibody fragment in Escherichia coli. Gene 151:131-135.
[0295] Sohail, M. (1998). A simple and rapid method for preparing genomic DNA from Gram-positive bacteria. Mol. Biotech. 10:191-193.
[0296] Sonderstrup G, Cope A P, Patel S, Congia M, Hain N, Hall F C, Parry S L, Fugger L H, Michie S, McDevitt H O (1999) HLA class II transgenic mice: models of the human CD4+ T-cell immune response. Immunol Rev 172:335-43
[0297] Sturniolo, T. et al., E Bono, J Ding, L Raddrizzani, O. Tuereci, U Sahin, M Braxenthaler, F Gallazzi, M P Protti, F Sinigaglia, and J Hammer (1999) Generation of tissue-specific and promiscuous HLA ligand databases using DNA chips and virtual HLA class II matrices. Nature Biotechnology 17: 555-562.
[0298] Valli et al. J. Clin. Invest. (1993) 91: 616-62
[0299] VandenBergh M. F. Q., Yzerman E. P. F., van Belkum, A., Boelens, H. A. M., Sijmons, M., and Verbrugh, H. A. (1999). Follow-up of Staphylococcus aureus nasal carriage after 8 years: redining the persistent carrier state. J. Clin. Microbiol. 37:3133-3140.
[0300] Wessel, D. and Fluegge, U.I. (1984). Anal. Biochem. 138:141-143.

The application's sequence listing, which the Patent Office published only in electronic form, follows.

SEQUENCE LISTING (603 sequences)

SEQ ID NO: 1 - DNA, 1938 bp, Staphylococcus aureus
atgaacaaacagcaaaaagaatttaaatcattttattcaattagaaagtcatcactaggcgttgcatctgtagcaattagtacacttttattattaatgtcaaatggcgaagcacaagcagcagctgaagaaacaggtggtacaaatacagaagcacaaccaaaaactgaagcagttgcaagtccaacaacaacatctgaaaaagctccagaaactaaaccagtagctaatgctgtctcagtatctaataaagaagttgaggcccctacttctgaaacaaaagaagctaaagaagttaaagaagttaaagcccctaaggaaacaaaagaagttaaaccagcagcaaaagccactaacaatacatatcctattttgaatcaggaacttagagaagcgattaaaaaccctgccataaaagacaaagatcatagcgcaccaaactctcgtccaattgattttgaaatgaaaaagaaagatggaactcaacagttttatcattatgcaagttctgttaaacctgctagagttattttcactgattcaaaaccagaaattgaattaggattacaatcaggtcaattttggagaaaatttgaagtttatgaaggtgacaaaaagttgccaattaaattagtatcatacgatactgttaaagattatgcttacattcgcttctctgtatcaaacggaacaaaagctgttaaaattgttagttcaacacacttcaataacaaagaagaaaaatacgattacacattaatggaattcgcacaaccaatttataacagtgcagataaattcaaaactgaagaagattataaagctgaaaaattattagcgccatataaaaaagcgaaaacactagaaagacaagtttatgaattaaataaaattcaagataaacttcctgaaaaattaaaggctgagtacaagaagaaattagaggatacaaagaaagctttagatgagcaagtgaaatcagctattactgaattccaaaatgtacaaccaacaaatgaaaaaatgactgatttacaagatacaaaatatgttgtttatgaaagtgttgagaataacgaatctatgatggatacttttgttaaacaccctattaaaacaggtatgcttaacggcaaaaaatatatggtcatggaaactactaatgacgattactggaaagatttcatggttgaaggtcaacgtgttagaactataagcaaagatgctaaaaataatactagaacaattattttcccatatgttgaaggtaaaactctatatgatgctatcgttaaagttcacgtaaaaacgattgattatgatggacaataccatgtcagaatcgttgataaagaagcatttacaaaagccaataccgataaatctaacaaaaaagaacaacaagataactcagctaagaaggaagctactccagctacgcctagcaaaccaacaccatcacctgttgaaaaagaatcacaaaaacaagacagccaaaaagatgacaataaacaattaccaagtgttgaaaaagaaaatgacgcatctagtgagtcaggtaaaggcgtaacgcttgctacaaaaccaactaaaggtgaagtagaatcaagtagtacaactccaactaaggtagtatctacgactcaaaatgttgcaaaaccaacaactggttcatcaaaaacaacaaaagatgttgttcaaacttcagcaggttctagcgaagcaaaagatagtgctccattacaaaaagcaaacattaaacacacaaatgatggacacactcaaagccaaaacaataaaaatacacaagaaaataaagcaaaatcattaccacaaactggtgaagaatcaaataaagatatgacattaccattaatggcattattagctttaagtagcatcgttgcattcgtattacctagaaaacgtaaaaactaa

SEQ ID NO: 2 - DNA, 939 bp, Staphylococcus aureus
atgagaaatatagagaatctaaatcccggagattcagttgatcactttttcttagtgcataaagctacacagggtgtaacagcacaaggtaaagattatatgacattacatttgcaagataaaagtggtgaaattgaagcgaaattttggacggctacaaaaaatgatatggcaacaatcaagcctgaagaaattgtacatgttaaaggtgacatcataaactatcgcggaaataaacagatgaaagtcaaccaaattagactagcgacaactgaagatcaattaaaaacagaacaatttgtagatggtgcacctttatcaccggcagaaatacaagaagagatttctcattatttgctagatattgaaaatgctaatttacaacgtatcacacgtcatttattgaaaaaatatcaagaacgattttacacatatccagctgctagttctcatcatcataactttgcgagtggcttaagctatcatgtattaacgatgttacgtattgcaaaatcaatttgtgacatttatccattgttaaacaaaagtttgttatatagtggtattattttgcatgatattggtaaagttagagaattgagtggtcctgttgcgacgtcgtatacagtcgaaggtaacttattaggacacatctcgattgcgagtgatgaagtagttgaagcagctcgtgaattgaacattgaaggagaagaaatcatgttgttaagacatatgattttatctcatcatggtaagttagagtatggttctccaaaactgccatacttaaaagaagcagaaattttatgctatatcgataatatcgatgctagaatgaatatgtttgaaaaggcatataaaaaaactgacaagggtcagtttacagataaaatatttggtcttgaaaatcgtagattctacaatcctgaatcactcgat

SEQ ID NO: 3 - DNA, 2685 bp, Staphylococcus aureus
atgaacaaacatcacccaaaattaaggtctttctattctattagaaaatcaactctaggcgttgcatcggtcattgtcagtacactatttttaattacttctcaacatcaagcacaagcagcagaaaatacaaatacttcagataaaatctcggaaaatcaaaataataatgcaactacaactcagccacctaaggatacaaatcaaacacaacctgctacgcaaccagcaaacactgcgaaaaactatcctgcagcggatgaatcacttaaagatgcaattaaagatcctgcattagaaaataaagaacatgatataggtccaagagaacaagtcaatttccagttattagataaaaacaatgaaacgcagtactatcactttttcagcatcaaagatccagcagatgtgtattacactaaaaagaaagcagaagttgaattagacatcaatactgcttcaacatggaagaagtttgaagtctatgaaaacaatcaaaaattgccagtgagacttgtatcatatagtcctgtaccagaagaccatgcctatattcgattcccagtttcagatggcacacaagaattgaaaattgtttcttcgactcaaattgatgatggagaagaaacaaattatgattatactaaattagtatttgctaaacctatttataacgatccttcacttgtaaaatcagatacaaatgatgcagtagtaacgaatgatcaatcaagttcagtcgcaagtaatcaaacaaacacgaatacatctaatcaaaatacatcaacgatcaacaatgctaataatcaaccgcaggcaacgaccaatatgagtcaacctgcacaaccaaaatcgtcaacgaatgcagatcaagcgtcaagccaaccagctcatgaaacaaattctaatggtaatactaacgataaaacgaatgagtcaagtaatcagtcggatgttaatcaacagtatccaccagcagatgaatcactacaagatgcaattaaaaacccggctatcatcgataaagaacatacagctgataattggcgaccaattgattttcaaatgaaaaatgataaaggtgaaagacagttctatcattatgctagtactgttgaaccagcaactgtcatttttacaaaaacaggaccaataattgaattaggtttaaagacagcttcaacatggaagaaatttgaagtttatgaaggtgacaaaaagttaccagtcgaattagtatcatatgattctgataaagattatgcctatattcgtttcccagtatctaatggtacgagagaagttaaaattgtgtcatctattgaatatggtgagaacatccatgaagactatgattatacgctaatggtctttgcacagcctattactaataacccagacgactatgtggatgaagaaacatacaatttacaaaaattattagctccgtatcacaaagctaaaacgttagaaagacaagtttatgaattagaaaaattacaagagaaattgccagaaaaatataaggcggaatataaaaagaaattagatcaaactagagtagagttagctgatcaagttaaatcagcagtgacggaatttgaaaatgttacacctacaaatgatcaattaacagatttacaagaagcgcattttgttgtttttgaaagtgaagaaaatagtgagtcagttatggacggctttgttgaacatccattctatacagcaactttaaatggtcaaaaatatgtagtgatgaaaacaaaggatgacagttactggaaagatttaattgtagaaggtaaacgtgtcactactgtttctaaagatcctaaaaataattctagaacgctgattttcccatatatacctgacaaagcagtttacaatgcgattgttaaagtcgttgtggcaaacattggttatgaaggtcaatatcatgtcagaattataaatcaggatatcaatacaaaagatgatgatacatcacaaaataacacgagtgaaccgctaaatgtacaaacaggacaagaaggtaaggttgctgatacagatgtagctgaaaatagcagcactgcaacaaatcctaaagatgcgtctgataaagcagatgtgatagaaccagagtctgacgtggttaaagatgctgataataatattgataaagatgtgcaacatgatgttgatcatttatccgatatgtcggataataatcacttcgataaatatgatttaaaagaaatggatactcaaattgccaaagatactgatagaaatgtggataaagatgccgataatagcgttggtatgtcatctaatgtcgatactgataaagactctaataaaaataaagacaaagtcatacagctgaatcatattgccgataaaaataatcatactggaaaagcagcaaagcttgacgtagtgaaacaaaattataataatacagacaaagttactgacaaaaaaacaactgaacatctgccgagtgatattcataaaactgtagataaaacagtgaaaacaaaagaaaaagccggcacaccatcgaaagaaaacaaacttagtcaatctaaaatgctaccaaaaactggagaaacaacttcaagccaatcatggtggggcttatatgcgttattaggtatgttagctttattcattcctaaattcagaaaagaatctaaa

SEQ ID NO: 4 - DNA, 1272 bp, Staphylococcus aureus
atgtcagattttaatcatacagatcattctacaacaaaccatagccaaacacctagatacagaagacctaaatttccatggtttaaaacagtcatcgttgcattgattgctggaattattggtgcacttctagtacttggtataggcaaagtattaaatagtacaattttaaataaagatggttcaactgttcagacaacaaataataaaggtggcaatcaattagacggtcaaagcaagaaattcggtaccgttcatgaaatgataaaatctgtctcccctacaattgttggagttattaacatgcaaaaagcatcaagtgtagacgacttattaaaaggcaaatcatctaaaccatctgaagctggagtaggttcaggtgttatctatcaaataaacaacaattcagcttatatcgttacaaacaatcatgttattgatggcgcaaatgaaattagagtccaattacataataaaaaacaagttaaagcgaaattagttggtaaagatgcagtaactgatattgctgtacttaaaattgaaaatacaaaaggtattaaagcgattcaatttgccaactcttcaaaagtacaaactggcgatagcgtattcgcaatgggtaacccattaggattacaatttgctaactctgtaacatctggtatcatttcagcaagcgaacgtacgattgacgctgagacaactggtggcaatacaaaagttagcgttcttcaaacagatgctgctattaacccaggtaactcaggtggcgcattagtagatattaatggtaatttagttggtattaactcaatgaaaattgctgcgacacaagttgaaggtatcgggtttgctattccaagtaatgaagttaaagtaacaattgaacaacttgtaaaacatggtaaaattgaccgcccttcgattggtattggtttaattaatttgaaagatattcctgaagaagagcgcgagcaacttcatactgatagagaagacggtatttatgtcgccaaagctgatagtgatattgatcttaaaaaaggtgatattattacagaaattgatggcaagaaaattaaagatgatgttgatttaagaagctatttatatgaaaataaaaaacctggtgaatcagtcactgttaccgttatccgtgatggtaaaacaaaagaagttaaagtgaaattaaaacaacaaaaagaacaaccaaaacgtcaaagccgatcagaacgtcaatcacctggccaaggcgatagagatttctttaga

SEQ ID NO: 5 - DNA, 1167 bp, Staphylococcus aureus
ttgatgattaatgaaagagaagtgtttattttgatatatctagataatgcggcamcgacgaaagcatttgaagaagtgttagatacttatttaaaagtaaatcaatcaatgtattataatccgaatagtccgcataaagctggtttgcaggcaaatcaattactacaacaagcaaaaacccaaattaatgcaatgattaattcaaaaacaaattatgatgttgtattcactagtggtgcaactgaatccaataatcttgctttaaaaggtattgcctatcgtaaatttgatacagcgaaggaaataattacatccgtgttagagcatccgtccgtattagaggttgtaagatatttggaagcacacgaaggatttaaagttaaatatgttgatgtaaagaaagatggcagtattaacttagaacacttcaaagaattaatgtcagacaaagtcggtttagtaacatgtatgtatgtaaataatgtaactggacaaatacagcctattccacaaatggctaaagttataaaaaattatcctaaggcacattttcatgtagatgcggttcaagcattcggcaaaatttcaatggatctcaataacatagatagtattagtttaagtggacacaagtttaatggtttaaaaggacaaggcgtcttacttgtaaatcacattcaaaatgttgaaccaactgtccatggtggtggtcaagaatatggcgttagaagtggaacagttaatttgccaaatgatattgcaatggttaaagcgatgaagatagctaatgaaaactttgaagcattgaatgcatttgttactgagttaaataatgacgtccgtcaatttttaaataaatatcatggagtttatattaattcttcaacttcaggttcaccattcgttttaaatattagttttcctggcgtaaaaggtgaagtattagttaatgctttttcaaaatatgacattatgatatctacgacaagtgcttgttcatctaaacgtaataaattaaatgaagtattggctgcaatgggattatcagacaaatctattgaaggtagtataagattatcatttggggctactacaactaaagaagatatagcgaggtttaaagaaatatttatcatcatttatgaggaaattaaggagttgctaaaa

SEQ ID NO: 6 - DNA, 2151 bp, Staphylococcus aureus
gtgaaccaacaacaggagaaaacaacaacaacgccaacaacaattaatccattaacgggagaaaaagtaggcgaaggtgaaccaacaacagaagtaacaaaagaaccagtagatgaaatcacacaattcggtggagaagaagtaccacaaggtcataaagatgagttcgatccaaacttaccaattgacggtacagaagaagtaccaggtaaaccaggcatcaagaatcctgaaacaggtgaagtagtaacacctccggttgacgatgtcacaaaacatggtccaaaagcaggcgaaccagaggttactaaagaagaaataccattcgagaaaaaacgtgagttcaatccagacttaaaaccaggtgaagagaaagtaacgcaagaaggacaaactggagagaaaacaacaacaacgccaacaacaattaatccattaacgggagaaaaagtaggcgaaggtgaaccaacaacagaagtaacaaaagaaccagtagatgaaatcacacaattcggtggagaagaagtaccacaaggtcataaagatgagttcgatccaaacttaccaattgacggtacagaagaagtaccaggtaaaccaggcatcaagaatcctgaaacaggtgaagtagtaacaccaccagtagacgatgtcacaaaacatggtccaaaagcaggcgaaccagaggttactaaagaagaaattccatatgaaactaaacgcgtattagatccaacaatggaaccaggtagtcctgataaagtagctcaaaaaggtgaaaatggtgaaaaaacaacaacaacaccaactacaattaatccattaacgggagaaaaagtaggcgaaggcgaaccaacaacggaagtaacgaaagaaccaatagacgaaattgttaactatgcacctgaaattattcctcatggtacacgtgaagaaattgatccaaacttaccagaaggtgaaactaaagttatcccaggtaaagatggcttgaaagatcctgaaactggagaaatcattgaagaaccacaagatgaagtaatcatccatggtgctaaagatgattcagatgcggacagcgattcagacgcagatagcgattctgatgcagacagcgactcagacgcagatagcgactctgatgcggacagcgattcagacagcgatagcgattcagattcagatagcgactctgatgcggacagcgattcagacgcagatagcgattcagattcagatagtgactctgatgcggacagcgactcagacgcagatagcgactctgatgcggacagcgactcagacgcagatagcgattctgattcagacagcgactcagacgcagatagcgactcagattcagacagcgattcagacgcagatagcgactcagacgcagatagcgattcagacgcagatagcgactcagacgcagatagcgattcagattcagatagcgactctgatgcggacagcgatagcgattcagattcagacagcgactcagacgcagatagcgattcagacagcgattcagacgcagatagcgactctgatgcggacagcgactcagacgcagatagcgactcagacgcagatagcgattcagattcagacagcgactcagattcagacagcgatagcgattcagattcagacagagactcagacgcagatagcgactcagacgcagatagcgactcagattcagacagcgattcagacgcagatagcgattcagattcagatagtgactctgatgcggacagcgattcagacgcagatagcgactcagattcagacgcagatagcgattctgattcagacagcgactcagacgcagatagcgactctgatgcggacagcgactcagacgcagatagcgattctgatgcagacagcgactcagacagcgatagcgattctgattcagacagcgattcagacgcagatagcgactctgatgcggacagcgattcagacgcagatagagatcataatgacaaaacagataaaccaaataataaagagttaccagatactggtaatgatgctcaaaataatggcacattatttggttcactattcgctgcgcttggaggattattcttagttggcagacgtcgtaaaaacaaaaataatgaagaaaaa

SEQ ID NO: 7 - DNA, 1359 bp, Staphylococcus aureus
gtgaagtcattgaagacggtgattgggatgaataataaggagcatattaaatctgtcattttagcactactcgtcttgatgagtgtcgtattgacatatatggtatggaacttttctcctgatattgcaaatgtcgacaatacagatagtaagaagagtgaaacgaaacctttaacgacacctatgacagccaaaatggatacaactattacgccatttcagattattcattcgaaaaatgatcatccagaaggaacgattgcgacggtatctaatgtgaataaactgacgaaacctttgaaaaataaagaagtgaagtccgtggaacatgttcgtcgtgatcataacttgatgattcctgatttgaacagtgattttatattattcgattttacgtatgatttaccgttatcaacatatcttggtcaagtactgaacatgaatgcgaaagtaccaaatcatttcaatttcaatcgtttggtcatagatcatgatgctgatgataatatcgtgctttatgctataagcaaagatcgccacgattacgtaaaattaacaactacaacgaaaaatgatcattttttagatgcattagcagcagtgaaaaaagatatgcaaccatacacagatatcatcacaaacaaagatacaattgatcgtacgacgcatgtttttgcaccaagtaaacctgaaaagttaaaaacatatcgcatggtatttaacacgattagtgttgagaaaatgaatgctatactatttgacgattcaaccatcgttcgtagttcaaagagtggtgttacaacctacaacaataatacaggtgtcgcaaactataacgataaaaatgaaaaatatcattataaaaacctgtccgaagatgaagcgagttccagcaaaatggaagaaacgattccaggaacctttgattttattaatggtcatggtggtttcttaaacgaagactttagattgtttagtacgaataatcagtcaggcgagttaacatatcaacgtttccttaatggttatccaacgtttaataaagaaggttctaatcaaattcaagtcacttggggtgaaaaaggcgtctttgactatcgtcgttcgttattacgcaccgacgttgttttaaatagtgaggataataaatcgttgccgaaattagagtctgtacgttcaagcttagcgaacaatagtgatattaattttgaaaaagtaacaaacatcgctatcggttacgaaatgcaggataattcagatcataatcacattgaagtgcagattaacagtgaactcgtaccgcgttggtatgtagaatatgatggcgaatggtatgtttataacgatgggaggcttgaa

SEQ ID NO: 8 - DNA, 6783 bp, Staphylococcus aureus
atgagtaaaagacagaaagcatttcatgacagcttagcaaacgaaaaaacaagagtaagactttataaatctggaaaaaattgggtaaaatccggaattaaagaaatagaaatgttcaaaattatggggctaccatttattagtcatagtttagtgagtcaagataatcaaagcattagtaaaaaaatgacgggatacggactgaaaactacggcggttattggtggtgcattcacggtaaatatgttgcatgaccagcaagcttttgcggcttctgatgcaccattaacttctgaattaaacacacaaagtgaaacagtaggtaatcaaaactcaacgacaatcgaagcatcaacatcaacagccgattccacaagtgtaacgaaaaatagtagttcggtacaaacatcaaatagtgacacagtctcaagtgaaaagtctgaaaaggtcacttcgacaactaatagtacaagcaatcaacaagagaaattgacatctacatcagaatcaacatcctcaaagaatactacatcaagttctgatactaaatctgtagcttcaacttcaagtacagaacaaccaattaatacatcaacaaatcaaagtactgcatcaaataacacttcacaaagcacaacgccatcttcggtcaacttaaacaaaactagcacaacgtcaactagcaccgcaccagtaaaacttcgaactttcagtcgcttagctatgtcaacatttgcgtcagcagcgacgacaaccgcagtaactgctaatacaattacagttaataaagataacttaaaacaatatatgacaacgtcaggtaatgctacctatgatcaaagtaccggtattgtgacgttaacacaggatgcatacagccaaaaaggtgctattacattaggaacacgtattgactctaataagagttttcatttttctggaaaagtaaatttaggtaacaaatatgaagggcatggaaatggtggagatggtatcggttttgccttttcaccaggtgtattaggtgaaacagggttaaacggtgccgcagtaggtattggtggcttaagtaacgcatttggcttcaaattggatacgtatcacaatacatctaaaccaaattcagctgcaaaggcgaatgctgacccatctaatgtagctggtggaggtgcgtttggtgcatttgtaacaacagatagttatggtgttgcgacaacgtatacatcaagttcaacagctgataatgctgcgaagttaaatgttcaacctacaaataacacgttccaagattttgatattaactataatggtgatacaaaggttatgactgtcaaatatgcaggtcaaacatggacacgtaatatttcagattggattgcgaaaagtggtacgaccaacttttcattatcaatgacagcctcaacaggtggcgcgacaaatttacaacaagtacaatttggaacattcgaatatacagagtctgctgttacacaagtgagatacgttgatgtaacaacaggtaaagatattattccaccaaaaacatattcaggaaatgttgatcaagtcgtgacaatcgataatcagcaatctgcattgactgctaaaggatataactacacgtccgtcgatagttcatatgcgtcaacttataatgatacaaataaaactgtaaaaatgacgaatgctggacaatcagtgacatattattttactgatgtaaaagcaccaactgtaactgtaggcaatcaaaccatagaagtgggtaaaacaatgaatcctattgtattgactacaacggataatggtactgggactgtgacaaatacagttacaggattaccaagcggattaagttacgatagtgcaacgaattcaatcattgggacaccaacaaaaattggtcaatcaacagtgacagttgtgtctactgaccaagcaaataacaaatcgacgacaacttttacaataaatgttgtggatacgacagcaccaacagtgacaccaataggagatcaatcatcagaagtgtattcaccaatatccccgattaaaattgctacgcaagataacagtggaaatgcggtgacgaatacagtgactggattgccatccggactaacatttgatagtacaaataatactattagtggtacaccaacaaacattggtacaagtactatatcaatcgtttctacagatgcgagcggtaacaaaacgacgacaacttttaaatatgaagtaacaagaaatagcatgagtgattccgtatcaacatcaggaagtacacaacaatctcaaagtgtgtcaacaagtaaagctgactcacaaagtgcatcaacgagtacatcaggatcgattgtggtatctacatcagctagtacctcgaaatcgacaagtgtaagcctatctgattctgtgagtgcatctaagtcattaagcacatctgaaagtaatagtgtatcaagctcaacaagcacaagtttagtgaattcacaaagtgtatcatcaagcatgtcggattcagctagtaaatcaacatcattaagcgattctatttcaaactctagcagtactgaaaaatccgaaagtctatcaacaagtacatctgattcattgcgtacatcaacatcactcagtgactcattaagtatgagtacatcaggaagcttgtctaagtcacaaagcttatcaacgagtatatcagggtcgtctagtacatcagcatcattaagtgacagtacatcgaatgcaattagtacatcaacatcattgagcgagtcagctagcacctcggactctatcagtatttcaaatagcatagccaactctcaaagtgcgtcaacaagcaaatcagattcacaaagtacatcaatatcattaagtacaagtgattcaaaatcgatgagtacatcagaatcattgagcgattcgacgagcacaagtggttctgtttctggatcactaagcatagcagcatcacaaagtgtctcaacaagtacatcagactcgatgagtacttcagagatagtaagtgactctatcagtacaagtgggtcattatctgcatcagacagtaaatcaatgtccgtaagtagttcaatgagcacgtctcagtcaggtagtacatcagaatcattaagtgattcacaaagtacatctgattctgatagtaagtcattatcacaaagtactagtcaatcaggttcaacaagtacatcaacgtcgacaagtgcttcagtacgtacttcggaatcacaaagtacgtctggttcaatgagtgcaagtcaatccgattcaatgagcatatcaacgtcgtttagtgattcaacgagtgatagcaaatcagcatcaactgcatcaagtgaatcaatatcacaaagtgcttctacgagcacatctggttcggtaagtacttcgacatcgttaagtacaagtaattcagaacgtacatcaacatctatgagtgattccacaagcttaagtacatcagagtctgattcaataagtgaatcaacgtcaacgagcgactctataagtgaagcaatatctgcttcagagagcacgtttatatcattaagtgaatcaaatagtactagcgattcagaatcacaaagtgcatctgcctttttaagtgaatcattaagtgaaagtacgtctgaatcaacatcagagtcagtgagtagttcgacaagtgagagtacgtcattatcagacagtacatcagaatctggtagcacatcaacatcattaagtaattcaacaagtggtagtacgtccatttcaacatcgacaagtatcagtgaatcaacgtcaacgtttaagagcgagagtgtttcaacatcactgagtatgtcaacgagtacaagtttgtctgactctacaagtttgtcaacatcattaagtgattccacaagtgatagtaagtctgattcattaagtacatcaatgtcgacaagtgattcaatcagtacaagtaaatctgattccattagtacatccacatcattaagtggttctacaagtgaaagtaaatccgattcaacatcaatgagcataagtatgtctcaatcaacatcaggaagtacaagtacgtcaacgagtacaagtttgtctgactcaacgagtacatcattgtcactaagtgcctcaatgaatcaaagcggagtagactcaaactcagcaagccaaagtgcctcaaactcaacaagtacaagcacgagcgaatccgattcacaaagcacatcatcatatacaagtcagtcaacaagccaaagtgaatccacatcgacatcaacgtcactaagcgattcaacaagtatatctaaaagtacgagtcaatcaggttcggtaagcacatcagcgtcattaagtggttcagagagtgaatctgattcacaaagtatctcaacaagtgcaagtgagtcaacatcagaaagtgcgtcaacatcactcagtgactcaacaagtacaagtaactcaggatcagcaagtacgtcaacatcgctcagtaactcagcaagcgcaagtgaatccgatttgtcgtcaacatctttaagtgattcaacatctgcgtcaatgcaaagcagtgaatccgattcacaaagcacatcagcatcattaagtgattcgctaagtacatcaacttcaaaccgcatgtcgaccattgcaagtttatctacatcggtaagtacatcagagtctggctcaacatcagaaagtacaagtgaatccgattcaacatcaacatcattaagcgattcacaaagcacatcaagaagtacaagtgcatcaggatcagcaagtacatcaacatcaacaagtgactctcgtagtacatcagcttcaactagtacttcgatgcgtacaagtactagtgattcacaaagtatgtcgctttcgacaagtacatcaacaagtatgagtgattcaacgtcattatctgatagtgttagtgattcaacatcagactcaacaagtgcgagtacatctggttcgatgagtgtgtctatatcgttaagtgattcgacaagtacatcaacatcggctagtgaagtaatgagcgcaagcatatctgattcacaaagtatgtcagaatctgtaaatgattcagaaagtgtaagtgaatctaattctgaaagtgactctaaatcgatgagtggctcaacaagtgtcagtgattctggctcattgagcgtctcaacgtcattaagaaaatcagaaagtgtaagcgagtcaagttcattgagttgctcacaatcgatgagcgattcagtaagcacaagcgattcgtcatcattaagtgtatcgacgtcactaagaagttcagaaagcgtgagtgaatctgattcattaagtgattcaaaatcaacaagtggttcgacttcaacaagtacatctggttcattgagtacctcaacatcattaagtggttcagaaagcgtaagcgagtctacctcgctaagtgattcaatatcaatgagtgattctactagtacaagtgactccgactcattaagtggatcaatatctttaagtggttccacaagtcttagcacttcggattcattaagtgattcaaaatcattgagtagctcgcaaagtatgagtggatcagaatcaacgtcaacaagtgtgagcgattcgcagtcaagctcaacaagtaatagtcaatttgactctatgagcatcagtgcatcagaaagcgactcaatgtctacaagtgattcgtctagcatcagtggatcaaattcaacgagtacatcactttcaacatctgactcaatgagcggaagcgtatcagtttcaacatcgacaagtttaagtgactcaatatcaggttcaacaagtgtaagtgactcgagctcaacaagcacatctacatcattaagtgattcaatgtcacaaagccagtcaacaagtacaagtgcatctggttccttaagtacatcgatatcaacatcaatgtcaatgagtgctagtacatcgtcatcacaaagcacatcggtgtcgacatcattatcaacatcagacagtatcagtgattctacttcaataagtatcagtggttcacaaagtacagtagaatcagaatctacaagtgattcaacttctatcagtgactcagaatcattgagtacatcagattcagactcgacatcgacaagtacatcggactcaacaagtggttcaacttcaacaagcatatctgaatcattaagtacgtctggttcaggttcaacgagcgtatctgactcaacatcaatgagtgaatctaattcatcgagtgtttcaatgtcacaagacaaatccgactcaacatcaattagtgactcagaatcagtgtcaacaagcacatcaacgtcattgagcacatccgattcgacaagcacatccgaatcactgagtacatctatgtctggttcacaaagcatttctgactcaacatcaacaagtatgtccggctcaacaagtacatctgaatctaactcaatgcatccgtcagactcaatgagtatgcatcatactcacagcacgagcacatctcgcttatcaagtgaagcaacaacgagcacgagtgaatctcagtctacattaagtgcaacatctgaagtgactaaacataatggcacaccagcacaaagtgaaaaaagattgccagatacaggtgactcaataaaacaaaatggattactaggtggcgttatgacattattagttggtttaggtttaatgaagagaaagaaaaagaaagatgaaaatgatcaagatgattctcaagca

SEQ ID NO: 9 - DNA, 1857 bp, Staphylococcus aureus
atgcctaaaaataaaattttaatttatttgctatcaactacgctcgtattacctactttagtttcacctaccgcttatgctgatacacctcaaaaagatactacagctaagacaacatctcatgattcaaaaaaatctaatgacgatgaaacttctaaggatactacaagtaaagatattgataaagcagacaaaaataatacaagtaaccaagacaataacgacaaaaaatttaaaactatagacgacagcacttcagactctaacaatatcattgattttatttataagaatttaccacaaaccaatataaaccaattgctaaccaaaaataaatacgatgataattactcattaacaactttaatccaaaacttattcaatttaaattcggatatttctgattacgaacaacctcgtaatggcgaaaagtcaacaaatgattcgaataaaaacagtgacaatagcatcaaaaatgacactgatacgcaatcatctaaacaagataaagcagacaatcaaaaagcacctaaatcaaacaatacaaaaccaagtacatctaataagcaaccaaattcgccaaagccaacacaacctaatcaatcaaatagtcaaccagcaagtgacgataaagcaaatcaaaaatcttcatcgaaagataatcaatcaatgtcagattcggctttagactctattttggatcaatacagtgaagatgcaaagaaaacacaaaaagattatgcatctcaatctaaaaaagacaaaaatgaaaaatctaatacaaagaatccacagttaccaacacaagatgaattgaaacataaatctaaacctgctcaatcattcaataacgatgttaatcaaaaggatacacgtgcaacatcattattcgaaacagatcctagtatatctaacaatgatgatagcggacaatttaacgttgttgactcaaaagatacacgtcaatttgtcaaatcaattgctaaagatgcacatcgcattggtcaagataacgatatttatgcgtctgtcatgattgcccaagcaatcttagaatctgactcaggtcgtagtgctttagctaagtcaccaaaccataatttattcggtatcaaaggtgcttttgaagggaattctgttccttttaacacattagaagctgatggtaatcaattgtatagtattaatgctggattccgaaaatatccaagcacgaaagaatcactaaaagattactctgaccttattaaaaatggtattgatggcaatcgaacaatttataaaccaacatggaaatcggaagccgattcttataaagatgcaacatcacacttatctaaaacatatgctacagatccaaactatgctaagaaattaaacagtattattaaacactatcaattaactcagtttgacgatgaacgcatgccagatttagataaatatgaacgttctatcaaggattatgatgattcatcagatgaattcaaacctttccgtgaggtatctgatagtatgccatatccacatggccaatgtacttggtacgtatataaccgtatgaaacaatttggtacatctatctcaggtgatttaggtgatgcacataattggaataatcgagctcaataccgtgattatcaagtaagtcatacaccaaaacgtcatgctgctgttgtatttgaggctggacaatttggtgcagatcaacattacggtcatgtagcatttgttgaaaaagttaacagtgatggttctatcgttatttcagaatccaatgttaaaggattaggtatcatttctcatagaactatcaacgcagctgccgctgaagaattatcatatattacaggtaaa

SEQ ID NO: 10 - DNA, 1527 bp, Staphylococcus aureus
gtgaggaaattttcaagatatgcatttacaagtatggcagcattaaccttgttgagcactttatcaccagcagcattagcgattgattcaaaaaataaaccagctaattctgatattaaatttgaggtgactcaaaagagtgatgcggtcaaagcattaaaagaattgcctaaatccgaaaatgtaaaaaatatttatcaagattacgctgttactgatgtaaaaactgataaaaaaggatttacgcattatacattgcaaccgagtgttgatggtgttcatgcacctgacaaagaagtgaaagtacacgcagacaaatcaggaaaagtcgttttaatcaatggggatactgatgcgaagaaagtaaagccaacgaataaagtgacattaagtaaagatgacgcagccgacaaagcatttaaagcagttaagattgataagaataaagcgaaaaatcttaaagataaagtcattaaagaaaacaaagttgaaatcgatggtgacagtaataaatacgtttataatgttgagttaattacagtgacaccagaaatttcacattggaaagttaaaattgatgctcaaactggcgaaattttagaaaaaatgaacttagttaaagaagctgcagaaactggtaaaggaaaaggtgtacttggcgatacaaaagatatcaatatcaatagtattgacggtggatttagcctagaagatttaacgcatcaaggtaaattatcagcatttagctttaatgatcaaacaggtcaagcaacattgattactaatgaagatgaaaacttcgtaaaagatgagcaacgtgctggcgtagatgcaaattattacgctaaacaaacatatgattattacaaagacacatttggtcgtgaatcatatgacaaccaaggtagtccaattgtttcattaacgcatgttaataactacggtggtcaagataacagaaataatgccgcatggatcggtgacaaaatgatctatggtgatggtgatggtcgcacattcacaagtttatcgggtgcaaatgacgtagtagcacacgaattaacacacggtgtgacacaagagacagcgaacttagaatataaggaccagtcaggcgctctaaatgaaagcttttcagatgtttttggatactttgtagatgacgaggatttcttaatgggtgaagatgtctacacacctggaaaagagggagacgctttacgcagcatgtcaaacccagaacaatttggtcaaccagctcatatgaaagactatgtattcactgaaaaagataatggtggcgtacatacgaattctggaattccaaataaagcagcttataacgtgattcaagcaatagggaaatctaaatcagaacaaatttactaccgagcattaacggaatacttaacaagtaattcaaacttcaaagattgtaaagatgcattataccaagcggctaaagatttatatgacgagcaaacagctgaacaggtgtatgaagcatggaatgaagtaggcgtggag

SEQ ID NO: 11 - DNA, 2739 bp, Staphylococcus aureus
ttgaaaaaaagaattgattatttgtcgaataagcagaataagtattcgattagacgttttacagtaggtaccacatcagtaatagtaggggcaactatactatttgggataggcaatcatcaagcacaagcttcagaacaatcgaacgatacaacgcaatcttcgaaaaataatgcaagtgcagattccgaaaaaaacaatatgatagaaacacctcaattaaatacaacggctaatgatacatctgatattagtgcaaacacaaacagtgcgaatgtagatagcacaacaaaaccaatgtctacacaaacgagcaataccactacaacagagccagcttcaacaaatgaaacacctcaaccgacggcaattaaaaatcaagcaactgctgcaaaaatgcaagatcaaactgttcctcaagaagcaaattctcaagtagataataaaacaacgaatgatgctaatagcatagcaacaaacagtgagcttaaaaattctcaaacattagatttaccacaatcatcaccacaaacgatttccaatgcgcaaggaactagtaaaccaagtgttagaacgagagctgtacgtagtttagctgttgctgaaccggtagtaaatgctgctgatgctaaaggtacaaatgtaaatgataaagttacggcaagtaatttcaagttagaaaagactacatttgaccctaatcaaagtggtaacacatttatggcggcaaattttacagtgacagataaagtgaaatcaggggattattttacagcgaagttaccagatagtttaactggtaatggagacgtggattattctaattcaaataatacgatgccaattgcagacattaaaagtacgaatggcgatgttgtagctaaagcaacatatgatatcttgactaagacgtatacatttgtctttacagattatgtaaataataaagaaaatattaacggacaattttcattacctttatttacagaccgagcaaaggcacctaaatcaggaacatatgatgcgaatattaatattgcggatgaaatgtttaataataaaattacttataactatagttcgccaattgcaggaattgataaaccaaatggcgcgaacatttcttctcaaattattggtgtagatacagcttcaggtcaaaacacatacaagcaaacagtatttgttaaccctaagcaacgagttttaggtaatacgtgggtgtatattaaaggctaccaagataaaatcgaagaaagtagcggtaaagtaagtgctacagatacaaaactgagaatttttgaagtgaatgatacatctaaattatcagatagctactatgcagatccaaatgactctaaccttaaagaagtaacagaccaatttaaaaatagaatctattatgagcatccaaatgtagctagtattaaatttggtgatattactaaaacatatgtagtattagtagaagggcattacgacaatacaggtaagaacttaaaaactcaggttattcaagaaaatgttgatcctgtaacaaatagagactacagtattttcggttggaataatgagaatgttgtacgttatggtggtggaagtgctgatggtgattcagcagtaaatccgaaagacccaactccagggccgccggttgacccagaaccaagtccagacccagaaccagaaccaacgccagatccagaaccaagtccagacccagaaccggaaccaagcccagacccggatccggattcggattcagacagtgactcaggctcagacagcgactcaggttcagatagcgactcagaatcagatagcgattcggattcagacagtgattcagattcagacagcgactcagaatcagatagcgattcagaatcagatagcgactcagattcagatagcgattcagattcagatagcgattcagattcagatagcgattcggattcagacagtgattcagattcagacagcgactcagaatcagatagcgactcagaatcagatagtgagtcagattcagacagtgactcggactcagacagtgattcagactcagatagcgattcagactcagatagcgattcagattcagacagcgactcagattcagacagcgactcagactcagatagcgactcagactcagacagcgactcagattcagatagcgattcagactcagacagcgactcagactcagacagcgactcagactcagatagcgactcagattcagatagcgattcagactcagacagcgactcagattcagatagcgattcggactcagacagcgattcagattcagacagcgactcagactcggatagcgattcagattcagatagcgattcggattcagacagtgattcagattcagacagcgactcagactcggatagcgactcagactcagacagcgattcagactcagatagcgactcagactcggatagcgactcggattcagatagcgactcagactcagatagtgactccgattcaagagttacaccaccaaataatgaacagaaagcaccatcaaatcctaaaggtgaagtaaaccattctaataaggtatcaaaacaacacaaaactgatgctttaccagaaacaggagataagagcgaaaacacaaatgcaactttatttggtgcaatgatggcattattaggatcattactattgtttagaaaacgcaagcaagatcataaagaaaaagcg

SEQ ID NO: 12 - DNA, 699 bp, Staphylococcus aureus
atgaaaaagacaattatggcatcatcattagcagtggcattaggtgtaacaggttacgcagcaggtacaggacatcaagcacacgctgctgaagtaaacgttgatcaagcacacttagttgacttagcgcataatcaccaagatcaattaaatgcagctccaatcaaagatggtgcatatgacatccactttgtaaaagatggtttccaatataacttcacttcaaatggtactacatggtcatggagctatgaagcagctaatggtcaaactgctggtttctcaaacgttgcaggtgcagactacactacttcatacaaccaaggttcaaatgtacaatcagtaagctacaatgcacaatcaagtaactcaaacgttgaagctgtttcagctccaacttaccataactacagcacttcaactacttcaagttcagtgagattaagcaatggtaatactgcaggtgctactggttcatcagcagctcaaatcatggctcaacgtactggtgtttcagcttctacatgggctgcaatcatcgctcgtgaatcaaatggtcaagtaaatgcttacaacccatcaggtgcttcaggtttattccaaactatgccaggttggggtccaacaaacactgttgaccaacaaatcaacgcagctgttaaagcatacaaagcacaaggtttaggtgcttggggattc

SEQ ID NO: 13 - DNA, 783 bp, Staphylococcus aureus
ttgggaggatatttaattatgaaaaaaatcgttacagctacaatcgctacagcaggacttgccactatcgcatttgcaggacatgatgcacaagccgcagaacaaaataacaatggatataattctaatgacgctcaatcatacagctatacgtatacaattgatgcacaaggtaattatcattacacttggacaggaaattggaatccaagtcaattaacgcaaaacaacacatactactacaacaactacaatacttatagttataacaatgcatcttacaataactactataatcattcatatcaatacaataactatacaaacaatagtcaaacagcaacaaataactattatactggtggttcaggtgcaagttatagcacaacaagtaataatgttcatgtgactacaactgcagcgccatcttcaaatggtcgttcaatttctaatggttatgcatcaggaagtaacttatatacttcaggacaatgtacttattatgtatttgatcgtgttggtgggaaaattggttcaacatggggtaacgcaagtaattgggctaacgcagctgcatcatctggctatacagtgaacaatacaccaaaagttggtgctatcatgcaaacaacacaaggctattacggtcatgttgcttacgttgaaggcgttaacagcaacggttctgttcgtgtttcagaaatgaactatggacatggtgctggtgtggttacgtctcgtacaatttcagcaaaccaagcaggttcatataatttcattcat

SEQ ID NO: 14 - DNA, 2406 bp, Staphylococcus aureus
gtggctaatacgaaaaaaacaacattagatatcactggtatgacttgtgccgcatgttcaaatcgtatcgaaaagaaactgaataaacttgatgacgttaatgcccaagtgaatttaactacagagaaagcaactgttgagtataaccctgatcaacatgatgtccaagaatttattaatacgattcaacatttaggttacggtgtcgctgtagaaactgtcgaattagacattacaggtatgacttgtgctgcatgctcaagccgtattgaaaaagtgttaaataaaatggacggcgttcaaaatgcaacggtcaatttaacaacagagcaagctaaagttgactattatcctgaagaaacagatgctgataaacttgtcactcgcattcaaaaattaggttatgacgcgtctattaaagataacaataaagatcaaacgtcacgcaaagctgaagcgctacaacataaattgattaagcttatcatatcagcagtattatctttaccactattaatgttaatgtttgtacatcttttcaatatgcatataccagcactatttacgaatccatggttccaatttattttagctacacctgtacaatttattattggatggcaattttatgtaggtgcttataaaaacttaagaaatggtggcgccaatatggatgtacttgttgctgttggtacaagtgcagcatatttttacagtatttatgaaatggttcgttggctaaatggctcaacaacgcaaccgcatttatactttgaaacaagcgccgtactaattaccttaatcttattcggtaagtatttagaagctagagcgaagtctcaaacaaccaatgcgcttggcgaattattaagtttacaagctaaagaagcacgcattttaaaagatggtaatgaagtgatgattcctctaaatgaagtacatgttggagatacacttatcgttaaaccaggtgaaaagatacctgttgatggcaaaattattaaaggtatgactgccatcgacgaatctatgttaacaggtgaatctatccctgttgagaagaatgttgatgatactgtaattggttcaacgatgaacaaaaacggtactattactatgacagcaacaaaagttggcggggacaccgcgttggcaaatattattaaagttgtcgaagaagctcaaagttctaaagcgccgattcaacgattggcagatattatttctggttatttcgttcctatcgttgttggtatcgcactattaacatttatcgtgtggattactttagttacaccaggtacatttgaacctgcacttgttgcgagtatttccgttctcgtcattgcttgtccatgcgcattgggacttgctacaccaacttctattatggtaggtactggtcgcgctgctgaaaatggtattttatttaaaggtggcgagtttgttgaacgcacacatcaaattgataccatcgttttagataagacgggtaccattacaaatggtcgtccagtcgtgacagattatcatggtgacaatcaaacgctacaactacttgctactgctgaaaaagattctgaacacccattggcagaagccattgtcaattatgcaaaagaaaagcaattaatattaactgagacaacaacatttaaagcagtacctggccatggtattgaagcaacgattgatcatcaccatatattggttggtaaccgtaaattaatggctgacaatgatattagcttgcctaagcatatttctgatgatttaacacattatgaacgagatggtaaaactgctatgctcattgctgttaattattcattaactggtatcatcgcagtggcagatactgtcaaagatcatgccaaagatgctataaaacaattgcatgatatgggcattgaagttgccatgttaactggcgataataaaaacactgctcaagccattgcaaaacaagtaggcatagatactgttattgcagatattttaccagaagaaaaagctgcacaaattgcgaaactacagcaacaaggtaagaaggttgcgatggttggtgacggtgtaaatgatgcacctgcattagttaaagctgatatcggtatcgccattggtacaggtacagaagttgccattgaagcagctgatattactattcttggtggcgacttgatgcttattcctaaagccatttatgcaagtaaagcaaccattcgtaatattcgtcaaaatctattttgggcattcggctataatattgccggtatccctatagctgcattgggcttacttgcgccatgggttgctggtgctgcaatggcactaagttcagtaagtgttgtcacaaacgcacttagattgaaaaagatgcgattagaaccacgccgtaaagatgcc

SEQ ID NO: 15 - DNA, 897 bp, Staphylococcus aureus
atgtttgattcaattagagagactatagattatgccgtagaaaataatatgtcatttgcggatatcatggttaaagaagaaatggaattaagcggtaaatcacgtgatgaagtgcgagcgcaaatgaaacaaaatttagatgtcatgcgagacgcagtaatcaaagggacgacaggtgatggggttgaaagtgtaacgggctacactggtcatgatgctgctaaactacgtgattataatgaaacacatcatgctttgtctggatatgaaatgattgacgcagtcaaaggtgccattgcaacaaatgaagtcaatgctgcgatgggtattatttgtgcaacgccaacagctggttcctcgggtaccattcccggtgcactttttaaattagaaaaaacacatgatttaacagaagagcaaatgattgatttcttattcacttcagcattgtttgggcgtgtcgtagcaaacaatgcaagtgtagctggtgcaacaggtggctgccaagctgaagttggttcagcatctgcaatggccgcagctgcagcagtagctatattcggaggatcaccagaagcatccgggcacgctatggcattagcgataagtaatttattaggtttagtttgtgatccagtagccggacttgttgaaattccttgtgttatgagaaatgcaattggttcgggtaacgctttaatttcagcagatttagcattagcaggtattgaaagtagaatccctgttgatgaagttattgaagcaatggataaggttggtcgtaaccttcctgcatcattacgtgaaactggattgggtggactagcaggcacaccaactggcgaagcaattaaacgtaaaatctttggcacagctgaagatatggttaaaaataat

SEQ ID NO: 16 - DNA, 3054 bp, Staphylococcus aureus
gtgaaaaacaatcttaggtacggcattagaaaacataaattgggagcagcatcagtattcttaggaacaatgatcgttgttgggatgggacaagacaaagaagctgcagcatcagaacaaaagacaactacagtagaagaaaatgggaattcagctactgataataaaacaagtgaaacacaaacaactgcaactaacgttaatcatatagaagaaactcaatcatataacgcaacagtaacagaacaaccgtcaaacgcaacacaagtaacaactgaagaagcaccaaaagcagtacaagcaccacaaactgcacaaccagcaaatatagaaacagttaaagaagaggtagttaaggaagaagcgaaacctcaagttaaggaaacaacacaatctcaagacaatagcggagatcaaagacaagtagatttaacacctaaaaaggctacacaaaatcaagtcgcagaaacacaagttgaagtggcacagccaagaacggcatcagaaagtaagccacgtgtgacaagatcagcagatgtagcggaagctaaggaagctagtaacgcgaaagtggaaacgggtacagatgtaacaagtaaagttacagtagaaattggttctattgaggggcataacaatacaaataaagtagaacctcatgcaggacaacgagcggtactaaaatataagttgaaatttgagaatggtttacatcaaggtgactactttgactttactttatcaaataatgtaaatacgcatggcgtatcaactgctagaaaagtaccagaaattaaaaatggttcagtcgtaatggcgacaggtgaagttttagaaggtggaaagattagatatacatttacaaatgatattgaagataaggttgatgtaacggctgaactagaaattaatttatttattgatcctaaaactgtacaaactaatggaaatcaaactataacttcaacactaaatgaagaacaaacttcaaaggaattagatgttaaatataaagatggtattgggaattattatgccaatttaaatggatcgattgagacatttaataaagcgaataatagattttcgcatgttgcatttattaaacctaataatggtaaaacgacaagtgtgactgttactggaactttaatgaaaggtagtaatcagaatggaaatcaaccaaaagttaggatatttgaatacttgggtaataatgaagacatagcgaagagtgtatatgcaaatacgacagatacttctaaatttaaagaagtcacaagtaatatgagtgggaatttgaatttacaaaataatggaagctattcattgaatatagaaaatctagataaaacttatgttgttcactatgatggagagtatttaaatggtactgatgaagttgattttagaacacaaatggtaggacatccagagcaactttataagtattattatgatagaggatataccttaacttgggataatggtttagttttatacagtaataaagcgaacggaaatgggaaaaatggtccgattattcaaaataataaatttgaatataaagaagatacaattaaagaaactcttacaggtcaatatgataagaatttagtaactactgttgaagaggaatatgattcatcaactcttgacattgattaccacacagctatagatggtggaggtggatatgttgatggatacattgaaacaatagaagaaacggattcatcagctattgatatcgattaccatactgctgtggatagcgaagcaggtcacgttggaggatacactgagtcctctgaggaatcaaatccaattgactttgaagaatctacacatgaaaattcaaaacatcacgctgatgttgttgaatatgaagaagatacaaacccaggtggtggtcaggttactactgagtctaacttagttgaatttgacgaagagtctacaaaaggtattgtaactggcgcagtgagcgatcatacaacagttgaagatacgaaagaatatacaactgaaagtaatctgattgaattagtggatgaattacctgaagagcatggtcaagcacaaggaccagtcgaggaaattactgaaaacaatcatcatatttctcattctggtttaggaactgaaaatggtcacgggaattatgacgtgattgaagaaatcgaagaaaatagccacgttgatattaagagtgaattaggttatgaaggtggccaaaatagcggtaaccagtcattcgaggaagacacagaagaagacaaacctaaatatgaacaaggtggcaatatcgtagatatcgattttgatagtgtacctcaaattcatggtcaaaataaaggtaatcagtcattcgaggaagatacagaaaaagacaaacctaagtatgaacatggcggtaacatcattgatatcgacttcgacagtgtgccacatattcacggattcaataagcacactgaaattattgaagaagatacaaataaagataaaccaagttatcaattcggtggacacaatagtgttgactttgaagaagatacacttccaaaagtaagcggccaaaatgaaggtcaacaaacgattgaagaagatacaacacctccaatcgtgccaccaacgccaccgacaccagaagtaccaagtgagccggaaacaccaacgccaccaacaccagaagtaccaagtgagccggaaacaccaacaccaccgacaccagaagtgccgagtgagccagaaactccaacaccgccaacaccagaggtaccagctgaacctggtaaaccagtaccacctgccaaagaagaacctaaaaagccttctaaaccagtggaacaaggtaaagtagtaacacctgttattgaaatcaatgaaaaggttaaagcagtggcaccaactaaaaaaccacaatctaagaaatctgaactacctgaaacaggtggagaagaatcaacaaacaaaggtatgttgttcggcggattattcagcattctaggtttagcattattacgcagaaataaaaagaatcacaaagca

SEQ ID NO: 17 - DNA, 2844 bp, Staphylococcus aureus
ttgcatttaagggagaatattatagtgaaaagcaatcttagatacggcataagaaaacacaaattgggagcggcctcagtattcttaggaacaatgatcgttgttggaatgggacaagaaaaagaagctgcagcatcggaacaaaacaatactacagtagaggaaagtgggagttcagctactgaaagtaaagcaagcgaaacacaaacaactacaaataacgttaatacaatagatgaaacacaatcatacagcgcgacatcaactgagcaaccatcacaatcaacacaagtaacaacagaagaagcaccgaaaactgtgcaagcaccaaaagtagaaacttcgcgagttgatttgccatcggaaaaagttgctgataaggaaactacaggaactcaagttgacatagctcaaccaagtaacgtctcagaaattaaaccaagaatgaaaagatcaactgacgttacagcagttgcagagaaagaagtagtggaagaaactaaagcgacaggtacagatgtaacaaataaagtggaagtagaagaaggtagtgaaattgtaggacataaacaagatacgaatgttgtaaatcctcataacgcagaaagagtaaccttgaaatataaatggaaatttggagaaggaattaaggcgggagattattttgatttcacattaagcgataatgttgaaactcatggtatctcaacactgcgtaaagttccggagataaaaagtacagatggtcaagttatggcgacaggagaaataattggagaaagaaaagttagatatacgtttaaagaatatgtacaagaaaagaaagatttaactgctgaattatctttaaatctatttattgatcctacaacagtgacgcaaaaaggtaaccaaaatgttgaagttaaattgggtgagactacggttagcaaaatatttaatattcaatatttaggtggagttagagataattggggagtaacagctaatggtcgaattgatactttaaataaagtagatgggaaatttagtcattttgcgtacatgaaacctaacaaccagtcgttaagctctgtgacagtaactggtcaagtaactaaaggaaataaaccaggggttaataatccaacagttaaggtatataaacacattggttcagacgatttagctgaaagcgtatatgcaaagcttgatgatgtcagcaaatttgaagatgtgactgataatatgagtttagattttgatactaatggtggttattctttaaactttaataatttagaccaaagtaaaaattatgtaataaaatatgaagggtattatgattcaaatgctagcaacttagaatttcaaacacacctttttggatattataactattattatacaagtaatttaacttggaaaaatggcgttgcattttactctaataacgctcaaggcgacggcaaagataaactaaaggaacctattatagaacatagtactcctatcgaacttgaatttaaatcagagccgccagtggagaagcatgaattgactggtacaatcgaagaaagtaatgattctaagccaattgattttgaatatcatacagctgttgaaggtgcagaaggtcatgcagaaggtaccattgaaactgaagaagattctattcatgtagactttgaagaatcgacacatgaaaattcaaaacatcatgctgatgttgttgaatatgaagaagatacaaacccaggtggtggtcaggttactactgagtctaacctagttgaatttgacgaagattctacaaaaggtattgtaactggtgctgttagcgatcatacaacaattgaagatacgaaagaatatacgactgaaagtaatctgattgaactagtagatgaactacctgaagaacatggtcaagcgcaaggaccaatcgaggaaattactgaaaacaatcatcatatttctcattctggtttaggaactgaaaatggtcacggtaattatggcgtgattgaagaaatcgaagaaaatagccacgtggatattaagagtgaattaggttacgaaggtggccaaaatagcggtaatcagtcatttgaggaagacacagaagaagataaaccgaaatatgaacaaggtggcaatatcgtagatatcgatttcgatagtgtacctcaaattcatggtcaaaataatggtaaccaatcattcgaagaagatacagagaaagacaaacctaagtatgaacaaggtggtaatatcattgatatcgacttcgacagtgtgccacatattcacggattcaataagcacactgaaattattgaagaagatacaaataaagataaaccaaattatcaattcggtggacacaatagtgttgactttgaagaagatacacttccacaagtaagtggtcataatgaaggtcaacaaacgattgaagaagatacaacacctccaatcgtgccaccaacgccaccgacaccagaagtaccaagcgagccggaaacaccaacaccaccgacaccagaagtaccaagcgagccggaaacaccaacaccgccaacgccagaggtaccaactgaacctggtaaaccaataccacctgctaaagaagaacctaaaaaaccttctaaaccagtggaacaaggtaaagtagtaacacctgttattgaaatcaatgaaaaggttaaagcagtggtaccaactaaaaaagcacaatctaagaaatctgaactacctgaaacaggtggagaagaatcaacaaacaacggcatgttgttcggcggattatttagcattttaggtttagcgttattacgcagaaataaaaagaatcacaaagca

SEQ ID NO: 18 - DNA, 3351 bp, Staphylococcus aureus
atgcaaatgagagataagaaaggaccggtaaataaaagagtagattttctatcaaataaattgaataaatattcaataagaaaatttacagttggaacagcatctattttaattggctcactaatgtatttgggaactcaacaagaggcagaagcagctgaaaacaatattgagaatccaactacattaaaagataatgtccaatcaaaagaagtgaagattgaagaagtaacaaacaaagacactgcaccacagggtgtagaagctaaatctgaagtaacttcaaacaaagacacaatcgaacatgaaccatcagtaaaagctgaagatatatcaaaaaaggaggatacaccaaaagaagtagctgatgttgctgaagttcagccgaaatcgtcagtcactcataacgcagagacacctaaggttagaaaagctcgttctgttgatgaaggctcttttgatattacaagagattctaaaaatgtagttgaatctaccccaattacaattcaaggtaaagaacattttgaaggttacggaagtgttgatatacaaaaaaaaccaacagatttaggggtatcagaggtaaccaggtttaatgttggtaatgaaagtaatggtttgataggagctttacaattaaaaaataaaatagattttagtaaggatttcaattttaaagttagagtggcaaataaccatcaatcaaataccacaggtgctgatggttgggggttcttatttagtaaaggaaatgcagaagaatatttaactaatggtggaatccttggggataaaggtctggtaaattcaggcggatttaaaattgatactggatacatttatacaagttccatggacaaaactgaaaagcaagctggacaaggttatagaggatacggagcttttgtgaaaaatgacagttctggtaattcacaaatggttggagaaaatattgataaatcaaaaactaattttttaaactatgcggacaattcaactaatacatcagatggaaagtttcatgggcaacgtttaaatgatgtcatcttaacttatgttgcttcaactggtaaaatgagagcagaatatgctggtaaaacttgggagacttcaataacagatttaggtttatctaaaaatcaggcatataatttcttaattacatctagtcaaagatggggccttaatcaagggataaatgcaaatggctggatgagaactgacttgaaaggttcagagtttacttttacaccagaagcgccaaaaacaataacagaattagaaaaaaaagttgaagagattccattcaagaaagaacgtaaatttaatccggatttagcaccagggacagaaaaagtaacaagagaaggacaaaaaggtgagaagacaataacgacaccaacactaaaaaatccattaactggagtaattattagtaaaggtgaaccaaaagaagagattacaaaagatccgattaatgaattaacagaatacggacctgaaacaatagcgccaggtcatcgagacgaatttgatccgaagttaccaacaggagagaaagaggaagttccaggtaaaccaggaattaagaatccagaaacaggagacgtagttagaccgccggtcgatagcgtaacaaaatatggacctgtaaaaggagactcgattgtagaaaaagaagarattccattcragaaagaacgtaaatttaatccggatttagcaccagggacagaaaaagtaacaagagaaggacaaaaaggtgagaagacaataacgacgccaacactaaaaaatccattaactggagaaattattagtaaaggtgaatcgaaagaagaaatcacaaaagatccgattaatgaattaacagaatacggaccagaaacgataacaccaggtcatcgagacgaatttgatccgaagttaccaacaggagagaaagaggaagttccaggtaaaccaggaattaagaatccagaaacaggagacgtagttagaccaccggtcgatagcgtaacaaaatatggacctgtaaaaggagactcgattgtagaaaaagaagaaattccattcaagaaagaacgtaaatttaatcctgatttagcaccagggacagaaaaagtaacaagagaaggacaaaaaggtgagaagacaataacgacgccaacactaaaaaatccattaactggagaaattattagtaaaggtgaatcgaaagaagaaatcacaaaagatccgattaatgaattaacagaatacggaccagaaacgataacaccaggtcatcgagacgaatttgatccgaagttaccaacaggagagaaagaggaagttccaggtaaaccaggaattaagaatccagaaacaggagatgtagttagaccaccggtcgatagcgtaacaaaatatggacctgtaaaaggagactcgattgtagaaaaagaagaaattccattcgagaaagaacgtaaatttaatcctgatttagcaccagggacagaaaaagtaacaagagaaggacaaaaaggtgagaagacaataacgacgccaacactaaaaaatccattaactggagaaattattagtaaaggtgaatcgaaagaagaaatcacaaaagatccagttaatgaattaacagaattcggtggcgagaaaataccgcaaggtcataaagatatctttgatccaaacttaccaacagatcaaacggaaaaagtaccaggtaaaccaggaatcaagaatccagacacaggaaaagtgatcgaagagccagtggatgatgtgattaaacacggaccaaaaacgggtacaccagaaacaaaaacagtagagataccgtttgaaacaaaacgtgagtttaatccaaaattacaacctggtgaagagcgagtgaaacaagaaggacaaccaggaagtaagacaatcacaacaccaatcacagtgaacccattaacaggtgaaaaagttggcgagggtcaaccaacagaagagatcacaaaacaaccagtagataagattgtagagttcggtggagagaaaccaaaagatccaaaaggacctgaaaacccagagaagccgagcagaccaactcatccaagtggcccagtaaatcctaacaatccaggattatcgaaagacagagcaaaaccaaatggcccagttcattcaatggataaaaatgataaagttaaaaaatctaaaattgctaaagaatcagtagctaatcaagagaaaaaacgagcagaattaccaaaaacaggtttagaaagcacgcaaaaaggtttgatctttagtagtataattggaattgctggattaatgttattggctcgtagaagaaagaat

SEQ ID NO: 19 - DNA, 1308 bp, Staphylococcus aureus
atgaaaaataaatatatctcgaagttgctagttggggcagcaacaattacgttagctacaatgatttcaaatggggaagcaaaagcgagtgaaaacacgcaacaaacttcaactaagcaccaaacaactcaaaacaactacgtaacagatcaacaaaaagctttttatcaagtattacatctaaaaggtatcacagaagaacaacgtaaccaatacatcaaaacattacgcgaacacccagaacgtgcacaagaagtattctctgaatcacttaaagacagcaagaacccagaccgacgtgttgcacaacaaaacgctttttacaatgttcttaaaaatgataacttaactgaacaagaaaaaaataattacattgcacaaattaaagaaaaccctgatagaagccaacaagtttgggtagaatcagtacaatcttctaaagctaaagaacgtcaaaatattgaaaatgcggataaagcaattaaagatttccaagataacaaagcaccacacgataaatcagcagcatatgaagctaactcaaaattacctaaagatttacgtgataaaaacaaccgctttgtagaaaaagtttcaattgaaaaagcaatcgttcgtcatgatgagcgtgtgaaatcagcaaatgatgcaatctcaaaattaaatgaaaaagattcaattgaaaacagacgtttagcacaacgtgaagttaacaaagcacctatggatgtaaaagagcatttacagaaacaattagacgcattagttgctcaaaaagatgctgaaaagaaagtggcgccaaaagttgaggctcctcaaattcaatcaccacaaattgaaaaacctaaagtagaatcaccaaaagttgaagtccctcaaattcaatcaccaaaagttgaggttcctcaatctaaattattaggttactaccaatcattaaaagattcatttaactatggttacaagtatttaacagatacttataaaagctataaagaaaaatatgatacagcaaagtactactataatacgtactataaatacaaaggtgcgattgatcaaacagtattaacagtactaggtagtggttctaaatcttacatccaaccattgaaagttgatgataaaaacggctacttagctaaatcatatgcacaagtaagaaactatgtaactgagtcaatcaatactggtaaagtattatatactttctaccaaaacccaacattagtaaaaacagctattaaagctcaagaaactgcatcatcaatcaaaaatacattaagtaatttattatcattctggaaa

SEQ ID NO: 20 - DNA, 1044 bp, Staphylococcus aureus
atggccgtattttcaaaagagaaaaagagaggatgtatcgttgtgatagaaacatttaaagcgtttgtaattgataaagatgagagtggtaaagtgacaccaactttcaaacaattatcgcctactgatttacctaaaggagatgtgctgattaaagtacattactctggtataaattataaagatgctttagcgactcaagaccataatgcagtcgtaaaatcgtatcctatgattccaggaatagatttagctggaacaattgttgaatccgaagcaccaggctttgaaaaaggagaacaagtaattgtaacgagttatgacctaggtgtcagccattatggcggttttagtgaatatgcgcgtgtaaaatcagaatggattatcaagcttcctgatactttaacattagaagaatcaatgatatatggcacagctggttatactgccggtttagcaattgaaagacttgaaaaagttggaatgaatattgaagatggtcctgtactcgttcgcggtgcttcaggtggtgtcggtactttagcagtactcatgcttaatgaacttggttataaagttatcgcaagtacaggtaaacaagatgttagcgatcaattacttgaacttggtgccaaagaagttatcgatcgacttcctgttgaagatgatcataaaaagccactcgcatcatcaacttggcaagcttgtgtagaccctgttggtggcgaaggtattaattatgttacaaagcgtttaaatcatagtgggtcaattgcagttattggtatgactgccggtaatacttatactaattctgtattccctcacattttaagaggtgtaaacattttaggaattgactcggtatttactgctatgaaattaagacagcgcgtttggcgtcgtctcgcaaaagatttaatgcctgaaaatttacatgagatcaagcaagttattacatttgatgaacttccagaacaacttaacaaagtaattaaacatgaaaataaagggcgcattgttatcgatttcggtgtagataaa

SEQ ID NO: 21 - DNA, 498 bp, Staphylococcus aureus
atgaaaaaattagtaacagcaactacgttaacagcaggaatcggcacagcattagtaggtcaagcatatcatgcagatgctgctgaaaattatacaaattacaacaactataactacaacacgactcaaactacaacgactacgacaactacgacaactacatcatcaatttcacattctggtaacttatacactgcaggacaatgtacttggtatgtatatgataaagttggcggagaaatcggttctacttggggaaatgctaataattgggctgctgctgcacaaggtgctggattcacagtaaatcatacaccttctaaaggcgctatcctacaatcttctgaaggaccatttggtcacgttgcatatgtagaaagtgtaaacagtgatggttcagttacaatttcagaaatgaattatagtggcggacctttctcagtaagttctagaactatttctgcaagtgaagcaggtaactacaactacatccatatt

SEQ ID NO: 22 - DNA, 801 bp, Staphylococcus aureus
atgaagaaaatcgctacagctactatcgcaactgcaggattcgctacaatcgcaattgcatcaggaaatcaagctcatgcttctgagcaagataactacggttataatccaaacgacccaacatcatatagctatacttacactattgatgcacaaggtaactaccattacacatggaaaggtaactggcatccaagtcaattaaaccaagataatggctactacagctattactactacaatggttacaataactataacaattacaacaacggttatagctacaataactacagccgttacaacaactactcaaataataatcaatcatataactacaataactataatagttacaacacaaacagctaccgtactggtggtttaggtgcaagctacagcacttcaagcaacaatgttcaagtaactacaactatggctccatcatcaaatggccgttcaatctcaagtggttatacttcaggacgtaacttatacacttctggtcaatgtacatactacgtatttgatcgtgtaggtggtaaaatcggttcaacttggggcaatgcaagtaactgggctaacgcagctgcaagagctggttacacagtgaacaatacaccaaaagctggtgcaattatgcaaacaactcaaggtgcatacggtcacgttgcatacgttgaaagtgttaacagcaatggttcagtaagagtttcagaaatgaactatggttatggcccaggtgttgtaacttcacgtacaatctcagctagccaagctgctggttataacttcattcac

SEQ ID NO: 23 - DNA, 2427 bp, Staphylococcus aureus
atgtcaatgacatatagaataaagaaatggcaaaaattatccaccattacgttattaatggctggtgtgattactttgaatggtggtgaattcagaagtgttgataaacatcaaatcgctgtggctgatacgaatgttcaaacgccagattatgaaaaattgaggaacacatggctggacgttaactatggttatgataagtatgatgagaataatccagatatgaagaagaagtttgatgctacagagaaagaggcgacgaatttactcaaggaaatgaaaactgaaagtggtaggaaatacttgtggtcaggagcggaaacccttgaaactaattcttctcatatgactcgtacctatcgtaatattgagaaaatcgcagaagcgatgaggaatcctaaaaccactttaaatactgacgaaaataagaagaaagtgaaagatgcccttgagtggctgcataaaaatgcatatggaaaagaaccagataaaaaagtaaaagaattaagtgagaattttactaaaacaactggcaagaataccaacttaaattggtgggattatgaaattggaacacctaaatcattaacaaatacgcttatattgctgaatgatcaattttcaaatgaagaaaagaaaaaattcactgcccctattaaaactttcgccccagatagtgacaaaatattatcttctgtaggaaaagctgaacttgctaaaggcggaaatctagtagacatttctaaggtgaaacttttagaatgtattatcgaagaagataaagatatgatgaaaaagtctatagattcatttaataaagtcttcactwacgttcaagattctgccactggtaaagaacgtaatggattttataaagatggctcttacattgatcatcaagacgttccatacactggtgcttatggcgttgtactcttagaggggatttctcaaatgatgccgatgataaaagaaacaccttttaatgataaaacccaaaatgatacaaccttaaagtcatggattgacgacggatttatgccactcatttataaaggtgaaatgatggatttatcacgaggtagagctatcagtcgtgaaaatgaaaccagtcactcagcatctgcaacagtaatgaaatcattgttgagattaagtgatgccatggatgattcaacaaaagctaagtataaaaagattgtcaaatcttcagtagagtcagattcaagttataaacaaaatgattatttaaattcatattcggacatagataaaatgaagtctttaatgacagataacagtatttctaaaaacggattaacacaacaacttaaaatatataatgacatggatcgtgtcacctatcataacaaagacttagactttgcatttggtttaagtatgacgtcgaaaaacgtagcacgctatgaaagtatcaacggagagaatttaaaaggttggcacactggtgctggaatgtcttatttatataacagcgatgtcaaacactatcatgataacttctgggtgacagccgatatgaaacgtttatcaggtacaacaactttagacaatgaaatattaaaagatacggatgataaaaagtcgagtaaaacttttgttggcggaacaaaagttgatgaccaacatgctagtatcggaatggattttgaaaatcaggacaaaactttaactgccaaaaaatcatatttcatattaaacgataaaattgtcttcttaggaactggcattaaaagtactgattcatcaaagaatccagttacaacgattgaaaatcgcaaagcgaatgggtatacgttatatacagacgataaacaaacaaccaattctgataatcaggaaaacaattcagtctttttagagtccacagataccaaaaagaacatcggttatcattttttaaacaaaccgaaaataactgtaaaaaaagaaagtcatactggtaagtggaaagaaataaataaaagtcaaaaggatacacaaaaaactgatgagtattatgaagtaactcaaaagcattctaattctgacaataaatatggatatgtgttgtatccaggcttatctaaagatgtctttaagacaaaaaaagatgaagtaactgtcgttaagcaagaagatgacttccacgttgtgaaagataatgaatcggtttgggctggtgttaattatagtaatagcactcaaacttttgacattaacaacactaaagtcgaagttaaagccaaaggtatgtttatacttaaaaagaaagatgataacacttatgaatgtagcttctataatcctgaatctacaaattccgcttcagatattgaatctaaaatttcaatgaccggttactctattacaaacaaaaatacgtcgacttctaatgaatccggcgtgcactttgaattaactaaa

SEQ ID NO: 24 - DNA, 237 bp, Staphylococcus aureus
gtgaatgatttgaagcaatttctatatattgcgttagtatgtggtgtgatagcaggtcttggtgctttcttacatataccgcagtatccgagcatgacaattccacgtatagtagctattttaggaattatcagtgctatgttgacttttaaagacaagcaaatcagcgcctcattaaagtttagcgcattgttaattaatgtgctgccattatgcggtacctttgtagcttcaaat

SEQ ID NO: 25 - DNA, 1269 bp, Staphylococcus aureus
gtgtctcgtgaaatgtcatatcattggtttaagaaaatgttactttcaacaagtattttaattttaagtagtagtagtttagggcttgcaacgcacacagttgaagcaaaggataacttaaatggagaaaaaccaactactaatttgaatcataatataacttcaccatcagtaaatagtgaaatgaataataatgagactgggacacctcacgaatcaaatcaaacgggtaatgaaggaacaggttcgaatagtcgtgatgctaatcctgattcgaataatgtgaagccagactcaaacaaccaaaacccaagtacagattcaaaaccagacccaaataaccaaaacccaagtccgaatcctaaaccagatccagataacccgaaaccaaaaccggatccaaaaccagacccagataaaccaaagccaaatccggatccaaaaccagatccagataacccgaaaccaaatccagatccaaaaccagacccagataaaccaaagccaaatccggatccaaaaccagatccagataaaccaaagccaaatccgaatccaaaaccagaccctaataagccaaatcctaacccgtcaccagatcccgatcaacctggggattccaatcattctggtggctcgaaaaatggggggacatggaacccaaatgcttcagatggatctaatcaaggtcaatggcaaccaaatgggaatcaaggaaactcacaaaatcctactggtaatgattttgtatcccaacgatttttagccttggcaaatggggcttacaagtataatccgtatattttaaatcaaattaataagttgggcaaagattatggagaagttactgatgaagacatttataatattattcgaaaacaaaatttcagcggaaatgcatatttaaatggattacaacagcaatcgaattactttagattccaatatttcaatccattgaaatcagaaaggtactatcgtaatttagatgaacaagtactcgcattaattactggtgaaattggatcaatgccagatttgaaaaagcccgaagataagccggattcaaaacaacgctcatttgaaccgcatgaaaaagacgattttacagtagttaaaaaacaagaagataataagaaaagtgcgtcaactgcatatagtaaaagttggctagcaattgtatgttctatgatggtggtattttcaatcatgctattcttatttgtaaagcgaaataaaaagaaaaataaaaacgaatcacagcgacga

SEQ ID NO: 26 - DNA, 1053 bp, Staphylococcus aureus
atgaaaaataaaaaacgtgttttaatagcgtcatcattatcatgtgcaattttattgttatcagcagcaacgactcaagcaaattcagctcataaagactctcaagaccaaaataagaaagaacatgttgataagtctcaacaaaaagacaaacgtaatgttactaataaagataaaaattcaacagcaccggatgatattgggaaaaacggtaaaatcacaaaacgaactgaaacagtatatgatgagaaaacaaatatactccaaaatttacaattcgactttatcgatgatccaacttatgacaagaatgtattacttgttaaaaaacaaggctcaattcattcaaatttaaagtttgaatctcataaagaagaaaaaaattcaaattggttaaagtatccaagtgagtaccatgtagattttcaagtaaaaagaaatcgtaaaactgaaatattagaccaattgccgaaaaataaaatttcaactgcaaaagtagacagtacattttcatatagctcaggtggtaaattcgattcaacaaaaggtattggacgaacttcatcaaatagctactccaaaacgattagttataatcagcaaaattatgacacaattgccagcggtaaaaataataactggcatgtacactggtcagttattgcgaatgacttgaagtatggtggagaagtgaaaaatagaaatgatgaattattattctatagaaatacgagaattgctactgtagaaaaccctgaactaagctttgcttcaaaatatagatacccagcattagtaagaagtggctttaatccagaatttttaacttatttatctaatgaaaagtcaaatgagaaaacgcaatttgaagtaacatacacacgaaatcaagatattttgaaaaacagacctggaatacattatgcacctccaattttagaaaaaaataaagatggtcaaagattaattgtcacttatgaagttgattggaaaaataaaacagttaaagtcgttgataaatattctgatgacaataaaccttataaagaagga

SEQ ID NO: 27 - DNA, 870 bp, Staphylococcus aureus
atgtatacacgtacagctacaacaagtgatagtcaaaaaaatattactcaaagcttacaatttaatttcttaactgaacctaattatgataaagaaacagtatttattaaagcaaaaggtacaattggtagtggtttgagaattttagacccaaatggttattggaatagtacattaagatggcctggatcttattcagtttcaattcaaaatgttgatgacaacaacaatacaaatgtgactgactttgcaccaaaaaatcaggatgaatcaagagaagttaaatatacgtatggttataaaacaggtggagatttttcgattaatcgtggaggcttaactggaaatattacaaaagagagtaattattcagagacgattagttatcaacaaccatcatatcgtacattacttgatcaatctacgtcacataaaggtgtaggttggaaagtagaagcacatttgataaataatatgggacatgaccatacgagacaattaactaatgatagtgataatagaactaaaagtgaaattttttctttaacacgaaatggaaatttatgggcgaaagataatttcacacctaaagacaaaatgcctgtaactgtgtctgaagggtttaatccagaatttttagctgttatgtcacatgataaaaaagacaaaggtaaatcacaatttgttgttcattataaaagatcaatggatgagtttaaaatagattggaatcgccatggtttctggggctattggtctggtgaaaaccatgtagataaaaaagaagaaaaattatcagcattatatgaagttgattggaagacacataatgtgaagtttgtaaaagtacttaatgataatgaaaagaaa

SEQ ID NO: 28 - DNA, 636 bp, Staphylococcus aureus
gtggtgaaatttatgaattatccaaatggtaaaccatatcgtaaaaatagtgctatagacggagggaaaaagaccgctgcctttagtaatattgagtatggtggacgtggtatgtcacttgaaaaagatatcgaacattcaaatacgttttatcttaaaagcgacattgcagttattcacaaaaagcctacgccagtacaaatagttaatgtcaactatcctaagcggagtaaagctgtgattaacgaagcttattttcgtacaccttcaacaactgattacaacggcgtttatcaaggttattatattgattttgaagcaaaggaaactaaaaacaagacgtcctttcctttaaataatattcatgaccatcaagtcgaacatatgaaaaatgcatatcaacaaaaaggtattgtgtttttaatgattcgttttaaaacgctagatgaagtttatcttttaccctattcaaaattcgaagtattttggaagagatataaagataatattaaaragtctataacagttgatgaaatacgaaaaaatggttaccatattccttatcagtatcaaccaagattagactatctaaaagcagttgataagttgatattagatgaaagtgaggaccgcgta

SEQ ID NO: 29 - DNA, 5976 bp, Staphylococcus aureus
gtgaatacaacgaaagcagcattacatggtgatgtgaagttacaaaatgataaagatcatgctaagcaaacggttagtcaattagcacatctaaacaatgcacaaaaacatatggaagatacgttaattgatagtgaaacaactagaacagcagttaagcaagatttgactgaagcacaagcattagatcaacttatggatgcattacaacaaagtattgctgacaaagatgcaacacgtgcgagcagtgcatatgtcaatgcagaaccgaataaaaaacaatcctatgatgaagcagttcaaaatgctgagtctatcattgcaggattaaataatccaactatcaataaaggtaatgtatcaagtgcgactcaagcagtaatatcatctaaaaatgcattagatggtgttgaacgattagctcaagataagcaaactgctggaaattctctaaatcatttagatcaattaacaccagctcaacaacaagcgctagaaaatcaaattaataatgcaacaactcgtggcgaagtagcacaaaaattaactgaagcacaagcacttaaccaagcaatggaagctttacgtaatagcattcaagatcaacagcaaacggaagcgggtagcaagtttatcaatgaagataaaccacaaaaagatgcttaccaagcagcagttcaaaatgcaaaagatttaattaatcaaactaacaatccaacgcttgataaagcacaagttgaacaattgacacaagctgttaaccaagctaaagataacctacacggtgatcaaaaacttgcagacgataaacaacatgcggttactgatttaaatcaattaaatggtttgaataatccgcaacgtcaagcacttgaaagccaaataaacaacgcagcaactcgtggcgaagtagcacaaaaattagctgaagcaaaagcgcttgatcaagcaatgcaagcattacgtaatagtattcaagatcaacaacaaacagaatctggtagcaagtttatcaatgaagataaaccgcaaaaagatgcttaccaagcagcagttcaaaatgcaaaagatttaattaaccaaacaggtaatccaacactcgacaaatcacaagtagaacaattgacacaagcagtaacaactgcaaaagataatctacatggtgatcaaaaacttgctcgtgatcaacaacaagcagtaacaactgtaaatgcattgccaaacttaaatcatgcacaacaacaagcattaactgatgctataaatgcagcgcctacaagaacagaggttgcacaacatgttcaaactgctactgaacttgatcacgcgatggaaacattgaaaaataaagttgatcaagtgaatacagataaggctcaaccaaattacactgaagcgtcaactgataaaaaagaagcagtagatcaagcgttacaagctgcagaaagcattacagatccaactaatggttcaaatgcgaataaagacgctgtagaccaagtattaactaagcttcaagaaaaagaaaatgagttaaatggtaatgagagagtcgctgaagctaaaacacaagcgaaacaaactattgaccaattaacacatttaaatgctgatcaaattgcaactgctaaacaaaacattgatcaagcgacgaaacttcaaccaattgctgaattagtagatcaagcaacgcaattgaatcaatctatggatcaattacaacaagcagttaatgaacatgctaacgttgagcaaactgtagattacacacaagcagattcagataaacaaaatgcttataaacaagctattgctgatgctgaaaatgtattgaaacaaaatgcgaataagcaacaagtggatcaagcacttcaaaatattttaaatgcaaaacaagcattaaatggtgatgaacgtgtagcacttgctaaaacaaatggtaaacatgacatcgaccaattgaatgcattaaacaatgctcaacaagatggatttaaaggtcgcatcgatcaatcaaacgatttaaatcaaatccaacaaattgtagatgaggctaaggcacttaatcgtgcaatggatcaattgtcacaagaaatcactgacaatgaaggacgcacgaaaggtagcacgaactatgtcaatgcagatacacaagtcaaacaagtatatgatgaaacggttgataaagcgaaacaagcacttgataaatcgactggtcaaaacttaactgcaaaacaagttatcaaattaaatgatgcagtcactgcagctaagaaagcattaaatggtgaagaaagacttaataatcgtaaagctgaagcattacaaagattggatcaattaacacatctaaacaatgctcaaagacaattagcaatccaacaaattaataatgctgaaacgctaaataaagcatctcgagcaattaatagagcaactaaattagataatgcaatgggtgcagtacaacaatatattgacgaacagcaccttggtgttatcagcagcacaaattacatcaatgcagatgacaatttgaaagcaaattatgataatgcaattgcgaatgcagcacatgagttagataaagtgcaaggtaatgcaattgcaaaagctgaagcagagcaattgaaacaaaatattatcgatgctcaaaatgcattaaatggagaccaaaaccttgcaaatgccaaagataaagcaaatgcgtttgttaattcgttaaatggattaaatcaacagcaacaagatcttgcacataaagcaattaacaatgccgatactgtatcagatgtaacagatattgttaataatcaaattgacttaaatgatgcaatggaaacattgaaacatttagttgacaatgaaattccaaatgcagagcaaactgtcaattaccaaaacgctgacgataatgctaaaacaaacttcgatgatgccaaacgtctagcaaatacattgctaaatagtgataacacaaatgtgaatgatatcaatggcgcaatccaagcagtcaatgatgcaatccataatcttaatggtgatcaacgactacaagatgctaaagacaaggcaattcaatctattaatcaagctttagctaataagctaaaagaaatcgaagcttcaaatgcgacggatcaagacaagcttattgcgaaaaataaagcagaagaattggcaaacagcatcatcaacaacattaataaagcaacaagtaatcaggctgtatctcaagttcaaacagcaggcaaccacgcgattgaacaagtgcatgccaatgaaataccaaaagcaaaaattgatgccaataaagacgttgataagcaagttcaagcattaattgacgaaattgatcgaaatccaaatctaacagataaggaaaaacaagcacttaaagatcgtattaatcaaatacttcaacaaggtcataacggcattaacaatgcgatgactaaagaagaaattgaacaagccaaagcacaacttgcgcaagcattacaagacatcaaagatttagtgaaagctaaagaagatgcgaaacaagatgttgataaacaagttcaagctttaattgacgaaatcgatcaaaatccaaatctaacagataaggaaaaacaagcacttaaagatcgtattaatcaaatacttcaacaaggtcatarcgacattamcaatgcgatgacaaaagaagcaattgaacaagcaaaagaacgtttagcgcaagcattgcaagacatcaaagatttagtgaaagctaaagaagatgcgaaaaatgatattgataaacgtgtacaagctttaattgacgaaatcgatcaaaatccaaatctaacagataaggaaaaacaagcacttaaagatcgaattaatcaaatacttcaacaaggtcataacgacattaacaatgcgctgactaaagaagaaattgagcaggcaaaagcacaacttgcacaagcattgcaagacatcaaagatttagtgaaagctaaagaagatgcgaaaaatgcaataaaagccttagctaatgcgaagcgtgatcaaatcaattcaaatccagatttaacacctgagcaaaaagcaaaagcgctcaaagaaattgacgaagctgaaaaacgagcactacaaaacgttgagaatgctcaaactatagatcaattaaatcgaggattaaacttaggtttagatgacattagaaatacacatgtatgggaggttgatgaacaacctgctgtaaatgaaatttttgaagcaacacctgagcaaatcctagttaatggtgaactcattgtacatcgtgatgacatcattacagaacaagatattcttgcacacataaacttaattgatcagctttcagcagaagtcatcgatacaccatcaactgcaacgatttctgatagcttaacagcaaaagttgaagttacattgcttgatggatcaaaagtgattgttaatgttcctgtaaaagttgtagaaaaagaattgtcagtagtcaaacaacaggcaattgaatcaatcgaaaatgcggcacaacaaaagattaatgaaatcaataatagtgtgacattaacactggaacaaaaagaagctgcaattgcagaagttaataagcttaaacaacaagcaattgatcatgttaacaatgcacctgatgttcattcagttgaagaaattcaacaacaagaacaagcgcatattgaacaatttaatccagaacaatttacgattgaacaagcaaaatcaaatgcaattaaatcgattgaagatgcaattcaacatatgattgatgaaatcaaagctcgtactgatctaacagataaagagaagcaagaagctattgctaagttaaatcaattaaaagaacaagcaattcaagcgattcaacgtgcgcaaagcatcgatgaaataagtgagcaattggaacaatttaaagctcaaatgaaagcagctaatccaacagcaaaagaactagctaaacgcaagcaagaagctattagtagaattaaagacttttcaaatgaaaaaataaatagtattcgaaatagtgaaattggcacagctgatgaaaaacaagcagcaatgaatcaaattaacgaaattgtgcttgaaacaattagagatattaataatgcgcatacattacagcaagttgaggctgcattgaacaatggtattgctcgaatttcagcagtacaaattgtaacatctgatcgtgctaaacaatcgtcaagtactggaaatgaatctaatagccatttaacaattggttatggaactgcaaatcatccatttaacagttcgactattggacataaaaagaaacttgatgaagatgatgacattgatccacttcatatgcgtcactttagtaataatttcggtaatgttattaaaaacgctattggtgtggtgggtatctctggtttactagctagtttctggttcttcattgccaaacgtcgtcgtaaagaagatgaagaggaagaattagaaataagagataataataaagattcaataaaagagactttagacgatacaaaacatttaccacttttatttgcgaaacgtcgcagaaaagaagatgaagaagatgttactgttgaagaaaaagattcgctaaataatggcgagtcactcgataaagttaaacatacgccgttcttcttaccaaaacgtcgtcgtaaagaagatgaagaagatgtggaagttacaaatgaaaacacagatgaaaaagtgttgaaagataacgaacattcaccactcttattcgcaaaacgacgcaaagataaagaggaagatgttgaaacaacaactagtattgaatctaaagatgaggacgttcctttattattggctaaaaagaaaaatcaaaaagataaccaatccaaagacaaaaagtcagcatcaaaaaatacttctaaaaaggtagcagctaaaaagaagaaaaagaaagctaagaaaaataaaaaa

SEQ ID NO: 30 - DNA, 2520 bp, Staphylococcus aureus
atgaatcaggaagttaaaaacaaaatattttcaatcttaaaaattacgtttgctacagctttatttatttttgtagcaatcacattgtatcgggagttatctggtattaactttaaagatacgttggttgaatttagtaagattaaccgtatgtccttagtgttactatttattggtggtggggcatcgcttgttattctatcaatgtatgatgtgattttatctagagctttaaaaatggatatatccttaggcaaagttttaagagtaagttatatcatcaatgcattgaatgcgattgtaggtttcggtggctttattggtgcaggcgttagagcaatggtttataaaaactatacgcatgataaaaagaaattagttcactttatatccttaatacttatttcaatgttgacaggtttaagcttattatcattgctaattgtattccatgttttcgatgcatctttaatcttagataagattacatgggtaagatgggtattatatgtagtgtcatttttcttaccattattcattatttattcaatggttagaccacccgataaaaacaatcgttttgtaggattgtactgcactttagtgtcgtgtgttgaatggttagcagctgcagttgtattatatttctgtggtgtaattgttgacgctcatgtatcattcatgtcctttattgcaatatttatcattgctgcattatcaggtttagtcagctttattcctggtggtttcggcgctttcgatttagttgtattactaggatttaaaactttaggtgtccctgaggaaaaagtattattaatgctacttctatatcgttttgcgtactattttgtaccggtaattattgcattaattttatcatcatttgaatttggtacatcagctaagaagtacattgagggatctaaatactttattcctgctaaagatgttacgtcatttttaatgtcttatcaaaaggatattattgctaaaattccatcattatcattagcaattttagtattctttacaagtatgatcttttttgtaaataacttaacgattgtttacgatgctttatatgatggaaatcacttaacgtattatattctattggcaattcatactagtgcttgtttattacttttactgaatgtagttggtatttataagcaaagtagacgtgccattatctttgctatgatttcaattttattaatcacagtggcgacattcttcacttacgcttcatatattttaataacatggttagctattatttttgttctgcttattgtagctttccgtagagcacgtaggttgaaacgcccagtaagaatgagaaatatagttgcaatgcttttattcagtttatttattttatatgttaaccatatatttattgctggaacgttatatgcattagatatttatacgattgaaatgcatacatctgtattgcgctattacttctggcttacgattttaatcatcgctatcatcataggtatgattgcatggttgtttgattatcaatttagcaaagtacgtatttcttctaaaattgaagattgcgaggagattattaatcagtacggcggtaattatttgagtcacttgatatatagtggtgacaagcagtttttcactaatgaaaataaaacagcatttttaatgtatcgttataaagcaagttcattagtggttcttggagatccgttaggtgatgaaaatgcctttgatgaattgttagaagcattctataattacgctgagtatttaggctatgatgttatattctatcaagttacagatcaacacatgcctttatatcataatttcggtaaccaatttttcaaattaggtgaagaagcaattattgatttaacgcaattttcaacttcaggtaaaaaacgccgtggatttagagcgactttaaataaattcgatgaacttaatatttcgttcgaaattattgaaccaccgttttcaactgaatttataaatgaacttcaacatgtaagtgatttatggctagataatcgtcaggaaatgcatttctctgttggtgaatttaatgaagaatacttatctaaagcgccaattggtgtaatgcgaaatgaagaaaatgaagtaattgcattttgtagtttaatgccaacatactttaatgatgccatttcagtcgatttaattagatggttgccagagttagatttaccattaatggatggtctatacttgcatatgttactttggagtaaagaacaaggttatacaaaatttaatatgggtatggcaacgttatcgaacgttggtcaattgcattattcatatttaagagaacgacttgcaggccgtgtctttgaacatttcaacggtctatatcgtttccaaggattacgtcgttataaatctaaatataatccgaattgggaaccacgctttttagtttatcgtaaagataattcgctttgggaatcactttctaaagtaatgcgtgtaatacgtcacaaa

SEQ ID NO: 31 - DNA, 3735 bp, Staphylococcus aureus
atggttgcattaacgcttgtaggttcagcagtcactgcacatcaagttcaagcagctgagacgacacaagatcaaactactaataaaaacgttttagatagtaataaagttaaagcaactactgaacaagcaaaagctgaggtaaaaaatccaacgcaaaacatttctggcactcaagtatatcaagaccctgctattgtccaaccaaaaacagcaaataacaaaacaggcaatgctcaagtaagtcaaaaagttgatactgcacaagtaaatggtgacactcgtgctaatcaatcagcgactacaaataatacgcagcctgttgcaaagtcaacaagcactacagcacctaaaactaacactaatgttacaaatgctggttatagtttagttgatgatgaagatgataattcagaaaatcaaattaatccagaattaattaaatcagctgctaaacctgcagctcttgaaacgcaatataaaaccgcagcacctaaagctgcaactacatcagcacctaaagctaaaactgaagcgacacctaaagtaactacttttagcgcttcagcacaaccaagatcagttgctgcaacaccaaaaacgagtttgccaaaatataaaccacaagtaaactcttcaattaacgattacattcgtaaaaataacttaaaagcacctaaaattgaagaagattatacatcttacttccctaaatacgcataccgtaacggcgtaggtcgtcctgaaggtatcgtagttcatgatacagctaatgatcgttcgacgataaatggtgaaattagttatatgaaaaataactatcaaaacgcattcgtacatgcatttgttgatggggatcgtataatcgaaacagcaccaacggattacttatcttggggtgtcggtgcagtcggtaaccctagattcatcaatgttgaaatcgtacacacacacgactatgcttcatttgcacgttcaatgaataactatgctgactatgcagctacacaattacaatattatggtttaaaaccagacagtgctgagtatgatggaaatggtacagtatggactcactacgctgtaagtaaatatttaggtggtactgaccatgccgatccacatggatatttaagaagtcataattatagttatgatcaattatatgacttaattaatgaaaaatatttaataaaaatgggtaaagtggcgccatggggtacgcaatctacaactacccctactacaccatcaaaaccaacaacaccgtcgaaaccatcaactggtaaattaacagttgctgcaaacaatggtgtcgcacaaatcaaaccaacaaatagtggtttatatactactgtatacgacaaaactggtaaagcaactaatgaagttcaaaaaacatttgctgtatctaaaacagctacattaggtaatcaaaaattctatcttgttcaagattacaattctggtaataaatttggttgggttaaagaaggcgatgtggtttacaacacagctaaatcacctgtaaatgtaaatcaatcatattcaatcaaacctggtacgaaactttatacagtaccttggggtacatctaaacaagttgctggtagtgtgtctggctctggaaaccaaacatttaaggcttcaaagcaacaacaaattgataaatcaatttatttatatggctctgtgaatggtaaatctggttgggtaagtaaagcatatttagttgatactgctaaacctacgcctacaccaacacctaagccatcaacacctacaacaaataataaattaacagtttcatcattaaacggtgttgctcaaattaatgctaaaaacaatggcttattcactacagtttatgacaaaactggtaagccaacgaaagaagttcaaaaaacatttgctgtaacaaaagaagcaagtttaggtggaaacaaattctacttagttaaagattacaatagtccaactttaattggttgggttaaacaaggtgacgttatttataacaatgcaaaatcacctgtaaatgtaatgcaaacatatacagtaaaaccaggcactaaattatattcagtaccttggggcacttataaacaagaagctggtgcagtttctggtacaggtaaccaaacttttaaagcgactaagcaacaacaaattgataaatctatctatttatttggaactgtaaatggtaaatctggttgggtaagtaaagcatatttagctgtacctgctgcacctaaaaaagcagtagcacaaccaaaaacagctgtaaaagcttatactgttactaaaccacaaacgactcaaacagttagcaagattgctcaagttaaaccaaacaacactggtattcgtgcttctgtttatgaaaaaacagcgaaaaacggtgcgaaatatgcagaccgtacgttctatgtaacaaaagagcgtgctcatggtaatgaaacgtatgtattattaaacaatacaagccataacatcccattaggttggttcaatgtaaaagacttaaatgttcaaaacttaggcaaagaagttaaaacgactcaaaaatatactgttaataaatcaaataacggcttatcaatggttccttggggtactaaaaaccaagtcattttaacaggcaataacattgctcaaggtacatttaatgcaacgaaacaagtatctgtaggcaaagatgtttatttatacggtactattaataaccgcactggttgggtaaatgcaaaagatttaactgcaccaactgctgtgaaaccaactacatcagctgccaaagattataactacacttatgtaattaaaaatggtaatggttattactatgtaacaccaaattctgatacagctaaatactcattaaaagcatttaatgaacaaccattcgcagttgttaaagaacaagtcattaatggacaaacttggtactatggtaaattatctaacggtaaattagcatggattaaatcaactgatttagctaaagaattaattaagtataatcaaacaggtatggcattaaaccaagttgctcaaatacaagctggtttacaatataaaccacaagtacaacgtgtaccaggtaagtggacaggtgctaactttaatgatgttaagcatgcaatggatacgaagcgtttagctcaagatccagcattaaaatatcaattcttacgcttagaccaaccacaaaatatttctattgataaaattaatcaattcttaaaaggtaaaggtgtattagaaaaccaaggtgctgcatttaacaaagctgctcaaatgtatggcattaatgaagtttatcttatctcacatgccctattagaaacaggtaacggtacttctcaattagcgaaaggtgcagatgtagtgaacaacaaagttgtaactaactcaaacacgaaataccataacgtatttggtattgctgcatatgataacgatcctttacgtgaaggtattaaatatgctaaacaagctggttgggacacagtatcaaaagcaatcgttggtggtgctaaattcatcggcaactcatatgtaaaagctggtcaaaatacactttacaaaatgagatggaatcctgcacatccaggaacacaccaatatgctacagatgtagattgggctaacatcaatgctaaaatcatcaaaggctactatgataaaattggcgaagtcggcaaatacttcgacatcccacaatataaa

SEQ ID NO: 32 - DNA, 1011 bp, Staphylococcus aureus
  misc_feature (761): "n" can be any nucleotide
atgaaaggtaaatttttaaaagttagttctttattcgttgcaactttgacaacagcgacacttgtgagttctccagcagcaaacgcgttatcttcaaaggctatggacaatcatccacaacaaacgcagtcaagcaaacagcaaacacctaagattcaaaaaggcggtaaccttaaaccattagaacaacgtgaacacgcaaatgttatattaccaaataacgatcgtcaccaaatcacagatacaacgaatggtcattatgcacccgtaacttatattcaagttgaagcacctactggtacatttattgcttccggtgtagttgtaggtaaagatactcttttaacraataaacacgtcgtagatgctacgcacggtgatcctcatgctttaaaagcattcccttctgcaattaaccaagacaattatccaaatggtggtttcactgctgaacaaatcactaaatattcagacgaaggtgatttagcaatagttaaattctcccctaatgagcaacacaaacatattggtgaagtagttaaaccagcaacaatgagtaataatgctgacactcaagttaaccaaaatattactgtaacaggatatcctggtgataaacctgtagcaacaatgtgggaaagtaaaggaaaaatcacttacctcaaaggcgaagctatgcaatatgatttaagtacaactggtggtaattcaggttcacctgtatttaatgaaaaaaatgaagtgatcggaattcattgggncggtgtaccaaatgaatttaatggtgcggtatttattaatgaaaatgtacgcaacttcttaaaacaaaatattgaagatatccattttgccacgatgaccaacctaataacccagataatcctgataaccctaacaatcctgataaccctaacaacccagatgaaccaaataaccctgacaaccctaacaaccctgataatccagacaatggcgatamcaataattcagacaatccagatgcagcttaat

SEQ ID NO: 33 - DNA, 1002 bp, Staphylococcus aureus
gtgcaaaaaaaagtaattgcagctattattgggacaagcgcgattagcgctgttgcggcaactcaagcaaatgcggctacaactcacacagtaaaaccgggtgaatcagtgtgggcaatttcaaataagtatgggatttcgattgctaaattaaagtcattaaacaatttaacatctaatctaattttcccaaaccaagtactaaaagtatctggctcaagtaattctacgagtaatagtagccgtccatcaacgaactcaggtggcggatcatactacacagtacaagcaggcgactcattatcattaatcgcatcaaaatatggtacaacttaccaaaacattatgcgacttaatggtttaaataatttctttatttatccaggtcaaaaattaaaagtatcaggtactgctagctcaagtaacgctgcgagcaatagtagccgtccatcaacgaactcaggtggcggatcatactatacagtacaagcaggtgactcattgtcattaattgcatcaaaatatggtacaacttatcaaaaaattatgagcttaaatggcttaaataatttctttatatatccgggtcaaaaattgaaagtaactggtaatgcatctacgaactcaggatctgcaacaacgacaaatagaggttacaatacaccagtattcagtcaccaaaacttatatacatggggtcaatgtacatatcatgtatttaatcgtcgtgctgaaattggtaaaggtattagtacttattggtggaatgctaataactgggataacgcagcggcagcagatggttacactatcgacaatagacctactgtaggttctatcgctcaaacagatgtaggttactatggtcatgttatgtttgtagaacgtgtaaataacgatggtagtattttagtttcagaaatgaactattcagctgcaccaggtattttaacttacagaacggtaccagcttaccaagtaaataattatagatatattcac

SEQ ID NO: 34 - DNA, 2841 bp, Staphylococcus aureus
atgaataataaaaagacagcaacaaatagaaaaggcatgataccaaatcgattaaacaaattttcgataagaaagtattctgtaggtactgcttcaattttagtagggacaacattgatttttgggttaagtggtcatgaagctaaagcggcagaacatacgaatggagaattaaatcaatcaaaaaatgaaacgacagccccaagtgagaataaaacaactaaaaaagttgatagtcgtcaactaaaagacaatacgcaaactgcaactgcagatcagcctaaagtgacaatgagtgatagtgcaacagttaaagaaactagtagtaacatgcaatcaccacaaaacgctacagctaatcaatctactacaaaaactagcaatgtaacaacaaatgataaatcatcaactacatatagtaatgaaactgataaaagtaatttaacacaagcaaaagatgtttcaactacacctaaaacaacgactattaaaccaagaactttaaatcgcatggcagtgaatactgttgcagctccacaacaaggaacaaatgttaatgataaagtacatttttcaaatattgacattgcgattgataaaggacatgttaatcagactactggtaaaactgaattttgggcaacttcaagtgatgttttaaaattaaaagcaaattacacaatcgatgattctgttaaagagggcgatacatttacttttaaatatggtcaatatttccgtccaggatcagtaagattaccttcacaaactcaaaatttatataatgcccaaggtaatattattgcaaaaggtatttatgatagtacaacaaacacaacaacatatacttttacgaactatgtagatcaatatacaaatgttagaggtagctttgaacaagttgcatttgcgaaacgtaaaaatgcaacaactgataaaacagcttataaaatggaagtaactttaggtaatgatacatatagcgaagaaatcattgtcgattatggtaataaaaaagcacaaccgcttatttcaagtacaaactatattaacaatgaagatttatcgcgtaatatgactgcatatgtaaatcaacctaaaaatacatatactaaacaaacgtttgttactaatttaactggatataaatttaatccaaatgcaaaaaacttcaaaatttacgaagtgacagatcaaaatcaatttgtggatagtttcacccctgatacttcaaaacttaaagatgttactgatcaattcgatgttatttatagtaatgataataaaacagctacagtcgatttaatgaaaggccaaacaagcagcaataaacaatacatcattcaacaagttgcttatccagataatagttcaacagataatggaaaaattgattatactttagacactgacaaaactaaatatagttggtcaaatagttattcaaatgtgaatggctcatcaactgctaatggcgaccaaaagaaatataatctaggtgactatgtatgggaagatacaaataaagatggtaaacaagatgccaatgaaaaagggattaaaggtgtttatgtcattcttaaagatagtaacggtaaagaattagatcgtacgacaacagatgaaaatggtaaatatcagttcactggtttaagcaatggaacttatagtgtagagttttcaacaccagccggttatacaccgacaactgcaaatgtaggtacagatgatgctgtagattctgatggactaactacaacaggtgtcattaaagacgctgacaacatgacattagatagtggattctacaaaacaccaaaatatagtttaggtgattatgtttggtacgacagtaataaagatggtaaacaagattcgactgaaaaaggaattaaaggtgttaaagttactttgcaaaacgaaaaaggcgaagtaattggtacaactgaaacagatgaaaatggtaaataccgctttgataatttagatagtggtaaatacaaagttatctttgaaaaacctgctggcttaactcaaacaggtacaaatacaactgaagatgataaagatgccgatggtggcgaagttgatgtaacaattacggatcatgatgatttcacacttgataatggctactacgaagaagaaacatcagatagcgactcagattctgacagcgattcagactcagatagcgactcagattcagatagcgactcagattcagacagcgattcagacagcgactcagactcagatagcgattcagattcagacagcgactcagactcagacagcgattcagactcggatagcgactcagactcagatagcgactcagattcggatagcgactcagactcagatagcgattcagattcagatagcgattcggactcagacagtgattcagattcagactcagatagcgactcagattctgacagcgattcagactcagacagcgactcagactcagacagtgattcagattcagacagcgactcagattcagatagcgactcagactcagatagcgactcagactcagatagcgactcagactcggatagcgattcagattcagacagcgactcagattcagatagcgattcggactcagacaacgactcagattcagatagcgattcagattcagatgcaggtaaacatactccggctaaaccaatgagtacggttaaagatcagcataaaacagctaaagcattaccagaaacaggtagtgaaaataataattcaaataatggcacattattcggtggattattcgcggcattaggatcattattgttattcggtcgtcgtaaaaaacaaaataaa

SEQ ID NO: 35 - DNA, 762 bp, Staphylococcus aureus
atggacataaattcagaagaatacaaacaagaggtacttatcaaagacgttgtcatgcttgctgctcgcatactattagaatctggtgcagaaggtacgcgtgtagaagataccatgacacgtattgcaaaaaaacttggttacagtgaaagtaacagctttgttacaaacactgtcatccagtttacgttacattcggaatcgtttcctagaatatttagaattacctctcgagatacaaacttaataaaaatttctcaagctaataaaatttcgcgtcaaattacaaacaatgaaatttctttagccgaagcaaaaacgcaacttgaaaaaatatatgttgctaagcgtgacagcagtcttccctttaaaggttttgctgcagcaatgattgcaatgagtttcttatatttacaaggtggtagattgattgatgttttaactgcgatattagcaggtagtctaggatacctagtcactgagattttagatcgtaagttacacgcacagtttatcccagaattcattggttcattagttattgggattatcgccgttattggacatacacttattccaacaggtgacttggcaactattatcattgcggcagtcatgcctattgttcctggtgtattaataacaaacgcaatacaagatttatttggtggacacatgttgatgttcacaacgaaatcattagaagcattggttactgcgtttggcatcggtgctggcgttggtagcgtattaattttagta

SEQ ID NO: 36 - DNA, 996 bp, Staphylococcus aureus
gtgattgctataatgaatgtaattatcgatgaaagaaaagagaatgctatgacatttaataaagtattattgagctggatagtcatattgattataacaactagcatatatctattttggcagttgggcgatatcaatgatgtatttaaccagtctattttaatcaatgttagattaccgagattattagaagcattgttgacaggtatgatattaactgttgcaggccttatatttcaaacagttttaaataatgcattggcagatagctttacattaggattggcaagcggcgctacatttggttcaggattagcattatttttaggtttaacaacgttatggattcctgtattttcaataacatttagtttgataacattaataactgtattagtcattacgtcggtattgagccaaggctatccagttagaatcttaatattaagtggtttaatgattggtgcgttattcaattcacttctatattttttgattttattaaaacctcgcaaattaaatacaattgccaattatctgtttggtggttttggtgatgcagaatactcaaatgtatctataatagcaatcacatttatcattgcattgtttggtatatttatcattcttaatcaactaaagttattgcaattaggagaactaaaaagtcagtcactaggcttaaatgttcaattgattacatatatcgcgttatgtatagcttctatgataacggcgataaatgtcgcatatgttggcatcattggattcattggtatggtgataccgcaactcattagaaaatggcagtggaaacaatcattaggaagacaattggctttaaatattgtaactggaggacaaataatggttatggcagattttattggtagccatatattgtcaccagtacaaataccggcaagtattatcattgcattaattggtataccagtgttattttacatgctaatatctcagtcgaaacggttacac

SEQ ID NO: 37 - DNA, 795 bp, Staphylococcus aureus
ttgaaaaaattagcatttgcaataacagcaacatctggtgcagctgcatttttaacgcatcatgatgcacaagcttctacacaacatacagtacaatctggtgaatcattatggagtattgctcaaaaatacaacacttcagtagagagtattaaacaaaataaccaattagataacaacttggtattccctggtcaagttatctcagtaggtggaagtgatgcacaaaatacgtcaaacacttctccacaagctggttcagcatcatctcatactgtacaagctggtgaatcattaaatatcattgctagcagatatggtgtttcagttgatcaattaatggcagccaataacttacgtggttatttaattatgcctaaccaaacattacaaattcctaatggtggatcaggtggtacaacaccaacagctacaacaggtagcaatggcaatgcatcatcttttaatcaccaaaatttatacactgctggtcaatgtacatggtacgtatttgaccgtcgtgctcaagctggtagtccaattagcacatattggtcagacgctaagtattgggctggtaacgcagctaatgatggttaccaagtaaacaacacaccatcagttggttcaattatgcaaagcacacctggtccatatggtcatgttgcttatgttgaacgtgtcaatggtgatggtagtatcttgatttctgaaatgaattacacatatggtccatacaatatgaactaccgtacaattccagcttcagaagtttctagctatgcattcatccat

SEQ ID NO: 38 - DNA, 759 bp, Staphylococcus aureus
atgccagattcaatcacaattatagatgaaaacaaagtgattgatgttgtattaattgcaggtagaattttacttgaatcaggtgctgaaacatatcgagttgaagatacaatgaaccgtatcgcacatagttatggtcttcataatacatatagttttgtcagttcaactgcaattattttttcattaaacgatcgaacaagtacaagattaattcgtgtacaagagcgtacaacagatttagagaaaatcgctttaacgaatagtctttcacgtaaaatatcaaataaagaactcacaattgatgaagctaaatctgaatttattcatttacagcatgcatcattacaatattcttttttaacgaatttctttgcagctgccattgcatgtggcttcttcctatttatgtttggtggtgtcgcatcagattgttggattgcagtcattgctggcggatccgcatttttaacattcagctttgtgcaacgctatatacaaattaaatttttctcagagtttgttgcagccgctgtggtcatatccattgcagccacatttactaaattaggcattgcaaccaatcaagatatcattactatagccagtgtcatgccacttgtccctggtatattaattaccaatgccattcgagatttattagcgggtgaattacttgcaggtatgtctcgcggtgttgaagctgcattaacagcattcgcaatcggtgctggtgtcgcaatcgttttattaatcatt

SEQ ID NO: 39 - DNA, 2529 bp, Staphylococcus aureus
atgggatttttatcaaaaattcttgatggcaataataaagaaattaaacagttaggtaaacttgctgataaagtaatcgctttagaagaaaaaacggcaattttaactgatgaagaaattcgtaataaaacgaaacaattccaaacagaattagctgacattgataatgtcaaaaagcaaaatgattatttagataaaattttaccagaagcatatgcacttgttagagaaggctctaaacgtgtattcaatatgacaccatataaagttcaaattatgggtggtattgcaattcataaaggtgatatcgctgagatgagaacaggtgaaggtaaaacattaacagcgacaatgccaacatacttaaatgcattagctggtagaggtgttcacgttattacagtcaatgaatacttatcaagtgttcaaagtgaagaaatggctgagttatataacttcttaggtttgactgtcggattaaacttaaacagtaagacgacagaagaaaaacgtgaagcatacgcacaagacattacttacagtactaataatgagctaggttttgattacttacgagataacatggtgaattattctgaagatagagtaatgcgtccattacattttgcaatcattgatgaggttgactcaattttaatcgacgaggcacgtacgccattaattatttctggtgaagctgaaaagtcaacgtcactttatacacaagcaaatgtttttgcgaaaatgttaaaacaggacgaagattataaatacgatgaaaaaacgaaagctgtacatttaacagaacaaggtgcggataaagctgaacgtatgttcaaagttgaaaacttatatgatgtacaaaatgttgatgttattagtcatatcaacacagctttacgtgcgcacgttacattacaacgtgacgtagactatatggttgttgatggcgaagtattaattgtcgatcaatttacaggacgtacaatgccaggccgtcgtttctcggaaggtttacaccaagctattgaagcgaaggaaggcgttcaaattcaaaatgaatctaaaactatggcgtctattacattccaaaactatttcagaatgtacaataaacttgcgggtatgacaggtacagctaaaactgaagaagaagaatttagaaatatttataacatgacagtaactcaaattccgacaaataaacctgtgcaacgtaacgataagtctgatttaatttacattagccaaaaaggtaaatttgatgcagtagtagaagatgttgttgaaaaacacaaggcagggcaaccagtgctattaggtactgttgcagttgagacttctgaatatatttcaaatttacttaaaaaacgtggtatccgtcatgatgtgttaaatgcgaaaaatcatgaacgtgaagctgaaattgttgcaggcgctggacaaaaaggtgccgttactattgccactaacatggctggtcgtggtacagatatcaaattaggtgaaggcgtagaggaattaggcggtttagcagtaataggtacagagcgacatgaatctcgtcgtattgatgaccagttacgtggtcgttctggacgtcaaggtgataaaggggatagtcgcttctatttatcattacaagatgaattaatgattcgttttggttctgaacgtttacagaaaatgatgagccgactaggtttagatgactctacaccaattgaatcaaaaatggtatcaagagctgtagaatcagcacaaaaacgtgtagaaggtaataacttcgacgcgcgtaaacgtatcttagaatacgatgaagtattacgtaaacaacgtgaaattatctataacgaaagaaatagtattattgatgaagaagacagctctcaagttgtagatgcaatgctacgttcaacgttacaacgtagtatcaattactatattaatacagcagatgacgagcctgaatatcaaccattcatcgactacattaatgacatcttcttacaagaaggtgacattacagaggatgatatcaaaggtaaagatgctgaagatattttcgaagtcgtttgggctaagattgaagcagcatatcaaagtcaaaaagatatcttagaagaacaaatgaatgagtttgagcgtatgattttacttcgttctattgatagccattggactgatcatatcgacacaatggatcaattacgtcaaggtattcacttacgttcttatgcacaacaaaatccattacgtgactatcaaaatgaaggtcatgaattatttgatatcatgatgcaaaatattgaagaagatacttgtaaattcattttaaaatctgtagtacaagttgaagataatattgaacgtgaaaaaacaacagagtttggtgaagcgaagcacgtttcagctgaagatggtaaagaaaaagtgaaaccgaaaccaatcgttaaaggcgatcaagttggtcgtaacgatgattgtccatgtggtagtggtaaaaaattcaaaaattgccatggaaaa

SEQ ID NO: 40 - DNA, 639 bp, Staphylococcus aureus
gtgagggagagtatgtcgaatcaaaattacgactacaataaaaatgaagatggaagtaagaagaaaatgagtacaacagcgaaagtagttagcattgcgacggtattgctattactcggaggattagtatttgcaatttttgcatatgtagatcattcgaataaagctaaagaacgtatgttgaacgaacaaaagcaggaacaaaaagaaaagcgtcaaaaagaaaatgcagaaaaagagagaaagaaaaagcaacaagaggaaaaagagcagaatgagctagattcacaagcaaaccaatatcagcaattgccacagcagaatcaatatcaatatgtgccacctcagcaacaagcacctacaaagcaacgtcctgctaaagaagagaatgatgataaagcatcaaaggatgagtcgaaagataaggatgacaaagcatctcaagataaatcagatgataatcagaagaaaactgatgataataaacaaccagctcagcctaaaccacagccgcaacaaccaacaccaaagccaaataataatcaacaaaacaatcaatcaaatcagcaagcaaaaccacaagcaccacaacaaaatagccaatcaacaacaaataaacaaaataatgctaatgataag

SEQ ID NO: 41 - DNA, 2799 bp, Staphylococcus aureus
atgaatatgaagaaaaaagaaaaacacgcaattcggaaaaaatcgattggcgtggcttcagtgcttgtaggtacgttaatcggttttggactactcagcagtaaagaagcagatgcaagtgaaaatagtgttacgcaatctgatagcgcaagtaacgaaagcaaaagtaatgattcaagtagcgttagtgctgcacctaaaacagacgacacaaacgtgagtgatactaaaacatcgtcaaacactaataatggcgaaacgagtgtggcgcaaaatccagcacaacaggaaacgacacaatcatcatcaacaaatgcaactacggaagaaacgccggtaactggtgaagctactactacgacaacgaatcaagctaatacaccggcaacaactcaatcaagcaatacaaatgcggaggaattagtgaatcaaacaagtaatgaaacgacttctaatgatactaatacagtatcatctgtaaattcacctcaaaattctacaaatgcggaaaatgtttcaacaacgcaagatacttcaactgaagcaacaccttcaaacaatgaatcagctccacagagtacagatgcaagtaataaagatgtagttaatcaagcggttaatacaagtgcgcctagaatgagagcatttagtttagcggcagtagctgcagatgcaccggcagctggcacagatattacgaatcagttgacgaatgtgacagttggtattgactctggtacgactgtgtatccgcaccaagcaggttatgtcaaactgaattatggtttttcagtgcctaattctgctgttaaaggtgacacattcaaaataactgtacctaaagaattaaacttaaatggtgtaacttcaactgctaaagtgccaccaattatggctggagatcaagtattggcaaatggtgtaatcgatagtgatggtaatgttatttatacatttacagactatgtaaatactaaagatgatgtaaaagcaactttgaccatgcccgcttatattgaccctgaaaatgttaaaaagacaggtaatgtgacattggctactggcataggtagtacaacagcaaacaaaacagtattagtagattatgaaaaatatggtaagttttataacttatctattaaaggtacaattgaccaaatcgataaaacaaataatacgtatcgtcagacaatttatgtcaatccaagtggagataacgttattgcgccggttttaacaggtaatttaaaaccaaatacggatagtaatgcattaatagatcagcaaaatacaagtattaaagtatataaagtagataatgcagctgatttatctgaaagttactttgtgaatccagaaaactttgaggatgtcactaatagtgtgaatattacattcccaaatccaaatcaatataaagtagagtttaatacgcctgatgatcaaattacaacaccgtatatagtagttgttaatggtcatattgatccgaatagcaaaggtgatttagctttacgttcaactttatatgggtataactcgaatataatttggcgctctatgtcatgggacaacgaagtagcatttaataacggatcaggttctggtgacggtatcgataaaccagttgttcctgaacaacctgatgagcctggtgaaattgaaccaattccagaggattcagattctgacccaggttcagattctggcagcgattctaattcagatagcggttcagattcgggtagtgattctacatcagatagtggttcagattcagcgagtgattcagattcagcaagtgattcagactcagcgagtgattcagattcagcaagcgattccgactcagcgagcgattccgactcagacaatgactcggattcagatagcgattctgactcagacagtgactcagattccgacagtgactcagattcagatagcgattctgactcagacagtgactcagattcagatagcgattcagattcagatagcgattcagattccgacagtgattccgactcagacagcgattctgactccgacagtgattccgactcagacagcgattcagattccgacagtgattccgactcagatagcgattccgactcagatagcgactcagattcagacagcgattcagattcagacagcgattcagattcagatagcgattcagattccgacagtgactcagattccgacagtgactcggattcagatagcgattcagattccgacagtgactcagattccgacagtgactcagactcagacagtgattcggattcagcgagtgattcggattcagatagtgattccgactccgacagtgactcggattcagatagcgactcagactcggatagcgactcggattcagatagcgattcggactcagatagcgattcagaatcagacagcgattcagaatcagacagcgattcagattcagacagcgactcagacagtgactcagattcagatagtgactcggattcagcgagtgattcagactcaggtagtgactccgattcatcaagtgattccgactcagaaagtgattcaaatagcgattccgagtcaggttctaacaataatgtagttccgcctaattcacctaaaaatggtactaatgcttctaataaaaatgaggctaaagatagtaaagaaccattaccagatacaggttctgaagatgaagcaaatacgtcactaatttggggattattagcatcaataggttcattactacttttcagaagaaaaaaagaaaataaagataagaaa

SEQ ID NO: 42 - DNA, 966 bp, Staphylococcus aureus
atgaattcaaatcacgctaaagcatcagtgacagagagtgttgacaaaaaatttgtagttccagaatcaggaattaataaaattattccagcttacgatgaatttaagaattcgccaaaagtaaatgttagtaatttaactgacaataaaaactttgtagcttctgaagataaattgaataagattgcagattcatcggcagctagtaaaattgtagataaaaactttgtcgtaccagaatcaaagttaggaaacattgtgccagagtacaaagaaatcaataatcgcgtgaatgtagcaacaaacaatccagcttcacaacaagttgataagcattttgttgctaaaggcccagaagtaaatagatttattacgcaaaacaaagtaaaccaccacttcattactacgcaaacccactacaagaaagttattacttcatacaaatcaacacatgtacataaacatgtaaatcatgcaaaggattctattaataaacactttattgttaaaccatcagaatcgcctagatatacacatccatctcaatctttaattatcaagcatcattttgcagttcctggatatcacgcgcataaatttgttacaccagggcatgctagcattaaaattaatcacttttgtgttgtgccacaaataaatagtttcaaggtaattccaccatatggtcacaattcacatcgtatgcatgtaccaagtttccaaaataacacaacagcaacacatcaaaatgctaaagtaaataaagcatatgactataaatacttctattcttataaagtagttaaaggtgtgaagaaatatttctcattttcacaatcaaatggttataaaattgggaaaccatcattaaatatcaaaaatgtaaattatcaatatgctgttccaagttatagccctacacactacgttcctgaatttaagggtagcttaccagcaccacgagta

SEQ ID NO: 43 - DNA, 1071 bp, Staphylococcus aureus
ttggagcatacaattatgaaaatgagaacaattgctaaaaccagtttagcactagggcttttaacaacaggcgcaattacagtaacgacgcaatcggtcaaagcagaaaaaatacaatcaactaaagttgacaaagtaccaacgcttaaagcagagcgattagcaatgataaacataacagcaggtgcaaattcagcgacaacacaagcagctaacacaagacaagaacgcacgcctaaactcgaaaaggcaccaaatactaatgaggaaaaaacctcagcttccaaaatagaaaaaatatcacaacctaaacaagaagagcagaaaacgcttaatatatcagcaacgccagcgcctaaacaagaacaatcacaaacgacaaccgaatccacaacgccgaaaactaaagtgacaacacctccatcaacaaacacgccacaaccaatgcaatctactaaatcagacacaccacaatctccaaccataaaacaagcacaaacagatatgactcctaaatatgaagatttaagagcgtattatacaaaaccgagttttgaatttgaaaagcagtttggatttatgctcaaaccatggacgacggttaggtttatgaatgttattccaaataggttcatctataaaatagctttagttggaaaagatgagaaaaaatataaagatggaccttacgataatatcgatgtatttatcgttttagaagacaataaatatcaattgaaaaaatattctgtcggtggcatcacgaagactaatagtaaaaaagttaatcacaaagtagaattaagcattactaaaaaagataatcaaggtatgatttcacgcgatgtttcagaatacatgattactaaggaagagatttccttgaaagagcttgattttaaattgagaaaacaacttattgaaaaacataatctttacggtaacatgggttcaggaacaatcgttattaaaatgaaaaacggtgggaaatatacgtttgaattacacaaaaaactgcaagagcatcgtatggcaggcactaatattgataacattgaagtgaatataaaa

SEQ ID NO: 44 - DNA, 2226 bp, Staphylococcus aureus
atgacaacaattaaaacatcaaacttaggattcccaagattaggtagaaaaagagaatggaaaaaagccatcgaaagttattgggcaaagaagatttctaaagaagaattagatcaaacattaactgatctacataaagaaaatttattattacaaaagtactatcacttagatagcatcccagttggtgatttctctttatatgaccatatattagatacgtcattattattcaacatcatccctgaacgtttccaaggaagaactattgatgatgatttattatttgatattgctcgcggtaataaagaccatgttgcaagtgcacttataaaatggtttaacactaactatcattacatcgtacctgaatgggacaatgttgagcctaaagtgagtcgcaatgtattattagatcgctttaaatatgcccaatctttaaacgttaacgctcaccctgtcattgttggtccgattacttttgttaaattatcaaaaggcggtcaccaaacttttgaagaaaaagttaaaacgttattaccactttataaagaagtgtttgaatcattaattgatgcaggtgctgagtacattcaagttgatgagccaatcttagttacagacgacagcgaaagctatgaaaatattacacgtgaagcttatgactatttcgaaaaagctggtgttgctaaaaaattagtcattcaaacatactttgaacgtgcacatcttaaattcttaagttctttacctgttggtggtataggtttagactttgtccatgataatggctataaccttaaacaaattgaagctggagattttgataaatcaaaaacattatacgctggaattattgatggtcgtaatgtatgggcaagtgacattgaagctaaaaaagtcttaatcgataaattgttagcacacactaatgaacttgtcattcaaccatcatcttcattattacatgttccagtatctttagatgatgaaacattagatacaagtgttggagaaggcttaagctttgcaactgaaaaattagacgaattagatgcattgcgtcgcctatttaatcaaaacgatagtgttaaatatgataaattaaaagcacgttatgagcgtttccaaaatcaatcattcaaaaacttagattatgatttcgaaagcgtgcgtacttcaagacaatcaccattcgcgcaacgtattgaacaacaacaaaaacgtttgaacttaccggatttaccaacaacaactattggatcattcccacaaagccgagaagttcgaaaataccgtgcagattggaagaacaaacgcattacagacgaagcatatgaaacattcttaaaaaatgaaattgctcgatggattaaaattcaagaagacattggcttagatgtattagttcacggtgaatttgaacgtaatgacatggttgaattcttcggagaaaaattacaaggtttcttagtaactaaattcggttgggtgcaatcatatggttcacgtgccgtaaaaccaccaatcatttatggtgatgtaaaatggacagcgcctttaactgttgatgaaacagtttatgcacaaagcttaacagataaaccagttaaaggtatgttaactggacctgtaacaattctaaactggtcatttgaacgtgttgatttaccacgtaaagtcgttcaagatcaaattgctttagcaatcaacgaagaagtattagcacttgaagctgcaggaatcaaagttatccaagttgacgaacctgcattacgtgaaggcttaccattacgctctgaatatcacgaacaatatcttaaagatgctgttttatcatttaaacttgcaacgtcttcagttcgtgatgaaactcaaatccatacacatatgtgttattctcaattcggtcaaatcattcatgctattcatgacttagatgctgatgttatttcaattgaaacatctcgtagccatggtgatttaattaaagactttgaagatattaattatgatttaggtattggtctaggtgtatatgatattcatagtccacgtattccaacaaaagaagaaattactacagcaatcaatcgttcactacaacaaatcgaccgctcattattctgggtaaaccctgactgtggtttaaaaacgcgaaaagaagaagaagttaaagatgcattgactgtgcttgtgaatgctgttaaagctaaacgccaagaa

SEQ ID NO: 45 - DNA, 159 bp, Staphylococcus aureus
atgagcgacacatataaaagctacctagtagcagtactatgcttcacagtcttagcaattgtacttatgccgtttctatacttcactacagcatggtcaattgcgggattcgcaagtatcgcaacattcatattttataaagaatacttttatgaagaa

SEQ ID NO: 46 - DNA, 1932 bp, Staphylococcus aureus
atgttaagaggacaagaagaaagaaagtatagtattagaaagtattcaataggcgtggtgtcagtgttagcggctacaatgtttgttgtgtcatcacatgaagcacaagcctcggaaaaaacatcaactaatgcagcggcacaaaaagaaacactaaatcaaccgggagaacaagggaatgcgataacgtcacatcaaatgcagtcaggaaagcaattagacgatatgcataaagagaatggtaaaagtggaacagtgacagaaggtaaagatacgcttcaatcatcgaagcatcaatcaacacaaaatagtaaaacaatcagaacgcaaaatgataatcaagtaaagcaagattctgaacgacaaggttctaaacagtcacaccaaaataatgcgactaataatactgaacgtcaaaatgatcaggttcaaaatacccatcatgctgaacgtaatggatcacaatcgacaacgtcacaatcgaatgatgttgataaatcacaaccatccattccggcacaaaaggtaatacccaatcatgataaagcagcaccaacttcaactacacccccgtctaatgataaaactgcacctaaatcaacaaaagcacaagatgcaaccacggacaaacatccaaatcaacaagatacacatcaacctgcgcatcaaatcatagatgcaaagcaagatgatactgttcgccaaagtgaacagaaaccacaagttggcgatttaagtaaacatatcgatggtcaaaattccccagagaaaccgacagataaaaatactgataataaacaactaatcaaagatgcgcttcaagcgcctaaaacacgttcgactacaaatgcagcagcagatgctaaaaaggttcgaccacttaaagcgaatcaagtacaaccacttaacaaatatccagttgtttttgtacatggatttttaggattagtaggcgataatgcacctgctttatatccaaattattggggtggaaataaatttaaagttatcgaagaattgagaaagcaaggctataatgtacatcaagcaagtgtaagtgcatttggtagtaactatgatcgcgctgtagaactttattattacattaaaggtggtcgcgtagattatggcgcagcacatgcagctaaatacggacatgagcgctatggtaagacttataaaggaatcatgcctaattgggaacctggtaaaaaggtacatcttgtagggcatagtatgggtggtcaaacaattcgtttaatggaagagtttttaagaaatggtaacaaagaagaaattgcctatcataaagcgcatggtggagaaatatcaccattattcactggtggtcataacaatatggttgcatcaatcacaacattagcaacaccacataatggttcacaagcagctgataagtttggaaatacagaagctgttagaaaaatcatgttcgctttaaatcgatttatgggtaacaagtattcgaatatcgatttaggattaacgcaatggggctttaaacaattaccaaatgagagttacattgactatataaaacgcgttagtaaaagcaaaatttggacatcagacgacaatgctgcctatgatttaacgttagatggctctgcaaaattgaacaacatgacaagtatgaatcctaatattacgtatacgacttatacaggtgtatcatctcatactggtccattaggttatgaaaatcctgatttaggtacatttttcttaatggctacaacgagtagaattattggtcatgatgcaagagaagaatggcgtaaaaatgatggtgtcgtaccagtgatttcgtcattacatccgtccaatcaaccatttgttaatgttacgaatgatgaacctgccacacgcagaggtatctggcaagttaaaccaatcatacaaggatgggat

SEQ ID NO: 47 - DNA, 1383 bp, Staphylococcus aureus
atgattcatctcattaaggggaagatgcatcatacagttttgtgtattcatttaaacaaaggggttgctttaatgaatcaatatcattctaatgcacaacaaccaagtgcatggcgtttttttgtctatagtttagtgggcatactatgtttctttattccttttacgattaatggtaacaacactattttcgtcgatcatgttcatctagccattcgctcaatcataggtccacttatgccctatgttgcactgattatgattttaattggtacagcgttaccaatagtgagacgtacttttatgacttcaatcacaaacttggtcattacattatttaaagttgcaggtgcaatgatcggtataatgtatgtatttaaaatcggtccatcaatactatttaaagctaactatggtccgtttttgtttgaaaaattaatgatgccattaagtatcttaattccagtaggtgcaattgcgctttctttattagtgggctatggcttattagaatttgtcggtgtttatatggagcctattatgagacctatttttaaaacaccaggaaaatccgctgtcgatgcagtggcttcgtttgtcggcagttattccttaggattattgattactaatcgtgtctataagcaagggatgtacaacaaacgagaagccacgattattgcgactggcttttcaacagtttcagcaacttttatgattatcgttgctaaaactttaggattaatgccgcattggaatttatacttttggataactttagtcatcacatttgtcgtgactgcaattactgcatggctaccgccaatcagcaatgaatcaacagaatattataacggacaagaaggagaacaagaagttgctattgaaggaagcagactgaaaactgcatatgcagaggcgatgaaacaaaatgcattaacaccatctctcgtgaagaacgtttgggacaatttgaaagacggtttagaaatgactgttggtattttaccttctatattatcgattggttttttaggactgattgtagcgaactatacaccattcattgattggcttggctatatcttctatccatttatttatattttcccaattgctgatcaggctttactagcaaaagcgtcagcgatttctattgtagagatgtttctaccatctttgttagtaactaaagctgcaatgagtactaaatttgtcgtcggtgtagtaagcgtatcagccattatctttttctcagcattagtgccatgtatactagcaactgaaattaaaatacctgtctggaaactcatcatcatttggtttttacgcgtggcgttgtcgctattaatcaccatccccgtcgctttacttatttttgga

SEQ ID NO: 48 - DNA, 900 bp, Staphylococcus aureus
atggttattatgaagaaaacaattttactgacgatgacaactcttactttatttagtatgtcgcctaactcggctcaagcatatacgaatgatagcaaaacattagaagaagcaaagaaagcacacccaaacgcacagttcaaagtgaataaagacaccggcgcgtatacttatacatatgacaaaaacaacacgccaaacaacaatcatcaaaaccagtcacgtacaaacgacaatcatcaacacgcaaatcaacgtgatcttaacaacaatcagtaccattcttcattaagtggtcagtatacgcacattaatgacgcaattgattcacacacaccgcctcaaacgtcaccaagcaatcctttgacaccagcaataccgaatgtcgaagacaatgacgatgaattaaataacgctttttcaaaagataacaaagggcttattacaggcatcgatttagacgaattgtatgacgaattacaaatcgccgaatttaatgacaaagcaaagaccgctgacggtaaacctttagcattaggtaacggtaaaatcattgatcagcctcttatcacaagtaagaacaacttatatactgctggacaatgtacatggtatgtctttgataaacgtgccaaagatggacacacgattagtacattttggggagatgctaaaaactgggcaggccaagcttcaagcaatggcttcaaagtagatagacacccaacacgaggatcaattttacaaacagtaaatggtccatttggtcatgtagcctacgttgaaaaagttaatattgatggaagtattctaatttcagaaatgaactggattggtgaatatatcgtttcatcaagaaccatctctgcttcagaagtttcatcatataattacatccat

SEQ ID NO: 49 - DNA, 933 bp, Staphylococcus aureus
ttggaggtatcgtcaatgaagccttatatacaacttgttgtgttcaagcaatggttacaatacatcttgctcgtaacaaccattgtcatcgcactcgtacttattggtatcggttaccgtgtagcacatgacaacttcaaaataccgattaccattcaagatttagaccaaaccactgcatcaaaatcattcgtcaataaaattaaacaatctgactatgtaactattaaaaaagtcgatgaagatgaaagctatattgaagatgatgttactaaaaaggaagctattttaagtatgcaaattcctaaaggtttctctcaaaaattaaaagagaaccgtttaaaagaaacgatacagttatatggtagagatgactttataggtggtattgctgtagaaattgttagtagttcattatatgagcagcaaattcctaacattatttatgaacaccttgaggatatgaaacagcatcaatccatcgatgctatcaacaagtcctatcataaacatacacctgaatctaaaatcaaatttgtgtcgcttactaaacaagcacaacactctatttcaattagcttaatctttgcggtgattttatttgttagcgctgttcaagtagtacttcattatcgtttaaaccaacaagcagcattgcaacgattatcacaatatcatttaagccgtttcaaactatatagtacttatgtaatgacacatacgattttgttattgttggtactattggcagttagtctatatttgtctcaaccactcagcttaatattttacttaaaatcactgttacttatattgatttatgagataggtatcgtctttatcttattccatattcaaacaataagtcatcgattattcatgacatttatatatgcacttgctatgggtatcgtatacttgattattttcatg

SEQ ID NO: 50 - DNA, 1395 bp, Staphylococcus aureus
atgattgaggtgacagagatgaacttttttgatatccataagattccgaacaaaggcattccattatcggtacaacgtaaattatggcttagaaacttcatgcaagctttcttcgtagtgttctttgtttatatggctatgtatttaattcgaaacaactttaaggcggcacaaccgtttttaaaagaggaaattggattatctacattagaacttggttatatcggattagcatttagtatcacgtacggtttaggaaaaacattacttggatattttgtcgatggacgtaacacaaaacgtattatctcgttcttacttatcttatctgcgattacagttttaattatgggatttgttttaagttactttggttctgtaatgggattattaattgtactttggggacttaacggggtgttccaatcagttggtggacctgcaagttattcaacgatttcaagatgggcgccaagaacgaaacgtggccgatacttaggattctggaatacatcacataatatcggtggtgccatagcaggtggtgttgcactttggggtgctaatgtattcttccatggaaatgttatagggatgttcattttcccatcggtgattgcattacttattggtatcgcaacattatttatcggaaaagatgatccggaagaattaggatggaatcgtgctgaagaaatttgggaagagccggtcgataaagaaaatattgattctcaaggtatgacgaaatgggagatctttaaaaaatatatcctgggaaatcctgttatatggattctatgtgtttcaaacgtctttgtatacattgtacgaatcggtattgataactgggcaccgttatatgtgtcagagcatttacactttagtaaaggcgatgcagttaatacgatattctactttgaaattggtgcattagttgcaagtttattatggggctacgtatcagacttattaaaaggtcgtcgtgcaattgtagctattggctgtatgtttatgattacatttgttgtcttattctacacaaatgctacaagtgtcatgatggttaacatttcattgtttgcattaggtgcgttaatctttggtccgcaattattaattggtgtatcattgactggttttgttcctaaaaatgccatcagtgtagcaaacggaatgacaggttcattcgcgtatctattcggtgactcaatggcgaaagttggtttggcggctattgctgatccaacacgtaacggtttaaacatctttggatatacattaagtggatggacagatgttttcatcgtcttctatgttgcattattcctaggcatgattctattaggaatcgttgctttctatgaagaaaagaaaattagaagtttaaaaatt

SEQ ID NO: 51 - DNA, 837 bp, Staphylococcus aureus
atgacaaagaagaaaaacatattaaaagcaatcggtatttacagttttatagcgatgatgtttgtcatcattttatatccactactgtggacatttggcatttcccttaatccaggtacgaacttgtatggtgccaaaatgataccagacaatgcaacatttaaaaattatgcattcttactattcgatgacagtagtcaatacctgacttggtataaaaatacgcttatcgtagcatctgcaaatgcactgtttagtgtgatatttgtcacgttaacagcatatgctttttctagatatcgctttgttggtcgtaaatacgggctgattacatttttgattttacaaatgttccctgtattaatggcaatggtcgcaatctatattttgctaaatacaattggattattagattctttatttggactaacactggtatatattggtggatcaataccgatgaatgcctttttagtgaaaggttacttcgatacgattccaaaagaacttgatgaatctgccaaaattgatggtgcagggcatatgcgtattttcttacaaattatgcttccattagctaagccgattttagcagttgttgctttgttcaattttatggggccatttatggactttatattacctaaaatactattaagaagtcctgaaaaattcacattagcagttggattgttcaactttattaatgataagtatgcaaataatttcacagtgtttgcagcaggggcaattatgattgcagtacctatagcaatcgtattcttgttcttgcaacgctatttagtatcaggtttaacaacaggtgcgacaaaaggt

SEQ ID NO: 52 - DNA, 897 bp, Staphylococcus aureus
gtgatggaaaatagtacgaccgaagcgcgtaatgaagcgacgatgcatcttgatgaaatgactgtggaagaggctttaattacgatgaataaagaagatcagcaagtcccgttagcagttcgaaaggcaataccacaattgacaaaagtaattaaaaaaacaattgcacagtataaaaagggtggacgattgatttatatcggtgcaggtacaagtggaaggttgggtgtcttagatgcagcggagtgtgtacctacattcaatactgaccctcatgaaattataggtattattgctggtggacaacatgctatgacgatggctgtagaaggtgcggaagatcacaaaaaattagcggaagaagatttgaaaaatatagatttaacatcaaaagatgtcgttataggaattgccgcgagtggcaaaacgccatatgttataggcggtttaacatttgctaacacaatcggtgctacaacagtatctatttcatgcaatgaacatgcagttataagtgaaattgcgcagtatccagtagaagttaaagttggtccagaagtattaactggttcaacacgtttaaagtctggtacagcacaaaagttaattttaaatatgatttcaaccatcacaatggttggtgtcggaaaagtttacgataacctcatgattgatgttaaagcaaccaatcaaaaactgatcgaccgttcagtgcgtattattcaagaaatatgtgctatcacatatgatgaagcaatggcgttatatcaggtatctgagcatgatgtgaaagttgcgacagttatgggtatgtgtggcatttctaaggaagaagcaacaagacggttattaaacaatggtgacattgttaaacgagcaatcagagatagacaacct

SEQ ID NO: 53 - DNA, 1584 bp, Staphylococcus aureus
ttgcaatacataattcgttatattatgatgactttacaaatacatacagggggtattaatttgaaaaagaaaaacatttattcaattcgtaaactaggtgtaggtattgcatctgtaactttaggtacattacttatatctggtggcgtaacacctgctgcaaatgctgcgcaacacgatgaagctcaacaaaatgctttttatcaagtcttaaatatgcctaacttaaatgctgatcaacgcaatggttttatccaaagccttaaagatgatccaagccaaagtgctaacgttttaggtgaagctcaaaaacttaatgactctcaagctccaaaagctgatgcgcaacaaaataacttcaacaaagatcaacaaagcgccttctatgaaatcttgaacatgcctaacttaaacgaagcgcaacgtaacggcttcattcaaagtcttaaagacgacccaagccaaagcactaacgttttaggtgaagctaaaaaattaaacgaatctcaagcaccgaaagctgataacaatttcaacaaagaacaacaaaatgctttctatgaaatcttgaatatgcctaacttaaacgaagaacaacgcaatggtttcatccaaagcttaaaagatgacccaagccaaagtgctaacctattgtcagaagctaaaaagttaaatgaatctcaagcaccgaaagcggataacaaattcaacaaagaacaacaaaatgctttctatgaaatcttacatttacctaacttaaacgaagaacaacgcaatggtttcatccaaagcctaaaagatgacccaagccaaagcgctaaccttttagcagaagctaaaaagctaaatgatgctcaagcaccaaaagctgacaacaaattcaacaaagaacaacaaaatgctttctatgaaattttacatttacctaacttaactgaagaacaacgtaacggcttcatccaaagccttaaagacgatccttcagtgagcaaagaaattttagcagaagctaaaaagctaaacgatgctcaagcaccaaaagaggaagacaataacaagcctggcaaagaagacaataacaagcctggcaaagaagacaacaacaagcctggtaaagaagacaacaacaagcctggcaaagaagacggcaacaagcctggtaaagaagacaacaaaaaacctggtaaagaagatggcaacaagcctggtaaagaagacaacaaaaaacctggtaaagaagacggcaacaagcctggcaaagaagatggcaacaaacctggtaaagaagatggtaacggagtacatgtcgttaaacctggtgatacagtaaatgacattgcaaaagcaaacggcactactgctgacaaaattgctgcagataacaaattagctgataaaaacatgatcaaacctggtcaagaacttgttgttgataagaagcaaccagcaaaccatgcagatgctaacaaagctcaagcattaccagaaactggtgaagaaaatccattcatcggtacaactgtatttggtggattatcattagccttaggtgcagcgttattagctggacgtcgtcgcgaacta

SEQ ID NO: 54 - DNA, 1155 bp, Staphylococcus aureus
ttggataaaaagtctgagaagcggggcattaaaatgacggtacaaagtgcatatatacatattccattttgtgtaagaatatgtacatattgtgatttcaataaatattttatacagaatcaacctgtagatgagtacttagatgcactaatcacagaaatgtctacagcaaaatataggatcttaaagaccatgtatgtaggtggcggcacaccaacggccctttctattaatcagttggaaagattacttaaagcaatacgtgatacgtttacaatcacaggcgagtatacatttgaagcaaatcctgatgagttaactaaagagaaagtccaactattagagaaatatggagtaaaaaggatttcaatgggcgttcaaacattcaagccggagttattgtctgttttaggtagaacgcacaatactgaagatatttacacttcggtgttaaatgctaaaaacgcaggtattaaatcaatcagtttagatttaatgtatcatttaccgaaacagacgattgaagattttgaacaaagtttagatctagctttagatatggatattcaacatatttcgagttacggcttaatacttgaacctaaaacccaattttataatatgtatagaaaaggcttgctcaaacttcctaatgaggatttaggtgctgacatgtatcagttgctgatgtctaagatagaacaatctcctttccatcaatacgaaatatctaattttgcattagatggccatgaatcagaacataataaggtttactggtttaatgaggaatattatggatttggagcaggtgcaagtggttatgtagatggtgtgcgttatacgaatatcaatccagtgaatcattatatcaaagctataaataaagaaagtaaagcaattttagtatcaaataaaccttctttgactgagagaatggaagaagaaatgtttcttgggttgcgtttaaatgaaggtgtgagtagtagtaggttcaaaaagaagtttgaccaatctattgaaagtgtctttggtcaaacaataaataatttaaaagagaaggaattaattgtagaaaagaacgatgtgattgcacttacaaatagagggaaagtcataggtaatgaggtttttgaagctttcctaataaatgat

SEQ ID NO: 55 - protein, 313 aa, Staphylococcus aureus
MRNIENLNPGDSVDHFFLVHKATQGVTAQGKDYMTLHLQDKSGEIEAKFWTATKNDMATIKPEEIVHVKGDIINYRGNKQMKVNQIRLATTEDQLKTEQFVDGAPLSPAEIQEEISHYLLDIENANLQRITRHLLKKYQERFYTYPAASSHHHNFASGLSYHVLTMLRIAKSICDIYPLLNKSLLYSGIILHDIGKVRELSGPVATSYTVEGNLLGHISIASDEVVEAARELNIEGEEIMLLRHMILSHHGKLEYGSPKLPYLKEAEILCYIDNIDARMNMFEKAYKKTDKGQFTDKIFGLENRRFYNPESLD

SEQ ID NO: 56 - protein, 895 aa, Staphylococcus aureus
MNKHHPKLRSFYSIRKSTLGVASVIVSTLFLITSQHQAQAAENTNTSDKISENQNNNATTTQPPKDTNQTQPATQPANTAKNYPAADESLKDAIKDPALENKEHDIGPREQVNFQLLDKNNETQYYHFFSIKDPADVYYTKKKAEVELDINTASTWKKFEVYENNQKLPVRLVSYSPVPEDHAYIRFPVSDGTQELKIVSSTQIDDGEETNYDYTKLVFAKPIYNDPSLVKSDTNDAVVTNDQSSSVASNQTNTNTSNQNTSTINNANNQPQATTNMSQPAQPKSSTNADQASSQPAHETNSNGNTNDKTNESSNQSDVNQQYPPADESLQDAIKNPAIIDKEHTADNWRPIDFQMKNDKGERQFYHYASTVEPATVIFTKTGPIIELGLKTASTWKKFEVYEGDKKLPVELVSYDSDKDYAYIRFPVSNGTREVKIVSSIEYGENIHEDYDYTLMVFAQPITNNPDDYVDEETYNLQKLLAPYHKAKTLERQVYELEKLQEKLPEKYKAEYKKKLDQTRVELADQVKSAVTEFENVTPTNDQLTDLQEAHFVVFESEENSESVMDGFVEHPFYTATLNGQKYVVMKTKDDSYWKDLIVEGKRVTTVSKDPKNNSRTLIFPYIPDKAVYNAIVKVVVANIGYEGQYHVRIINQDINTKDDDTSQNNTSEPLNVQTGQEGKVADTDVAENSSTATNPKDASDKADVIEPESDVVKDADNNIDKDVQHDVDHLSDMSDNNHFDKYDLKEMDTQIAKDTDRNVDKDADNSVGMSSNVDTDKDSNKNKDKVIQLNHIADKNNHTGKAAKLDVVKQNYNNTDKVTDKKTTEHLPSDIHKTVDKTVKTKEKAGTPSKENKLSQSKMLPKTGETTSSQSWWGLYALLGMLALFIPKFRKESK

SEQ ID NO: 57 - protein, 424 aa, Staphylococcus aureus
MSDFNHTDHSTTNHSQTPRYRRPKFPWFKTVIVALIAGIIGALLVLGIGKVLNSTILNKDGSTVQTTNNKGGNQLDGQSKKFGTVHEMIKSVSPTIVGVINMQKASSVDDLLKGKSSKPSEAGVGSGVIYQINNNSAYIVTNNHVIDGANEIRVQLHNKKQVKAKLVGKDAVTDIAVLKIENTKGIKAIQFANSSKVQTGDSVFAMGNPLGLQFANSVTSGIISASERTIDAETTGGNTKVSVLQTDAAINPGNSGGALVDINGNLVGINSMKIAATQVEGIGFAIPSNEVKVTIEQLVKHGKIDRPSIGIGLINLKDIPEEEREQLHTDREDGIYVAKADSDIDLKKGDIITEIDGKKIKDDVDLRSYLYENKKPGESVTVTVIRDGKTKEVKVKLKQQKEQPKRQSRSERQSPGQGDRDFFR

SEQ ID NO: 58 - protein, 717 aa, Staphylococcus aureus
VNQQQEKTTTTPTTINPLTGEKVGEGEPTTEVTKEPVDEITQFGGEEVPQGHKDEFDPNLPIDGTEEVPGKPGIKNPETGEVVTPPVDDVTKHGPKAGEPEVTKEEIPFEKKREFNPDLKPGEEKVTQEGQTGEKTTTTPTTINPLTGEKVGEGEPTTEVTKEPVDEITQFGGEEVPQGHKDEFDPNLPIDGTEEVPGKPGIKNPETGEVVTPPVDDVTKHGPKAGEPEVTKEEIPYETKRVLDPTMEPGSPDKVAQKGENGEKTTTTPTTINPLTGEKVGEGEPTTEVTKEPIDEIVNYAPEIIPHGTREEIDPNLPEGETKVIPGKDGLKDPETGEIIEEPQDEVIIHGAKDDSDADSDSDADSDSDADSDSDADSDSDADSDSDSDSDSDSDSDSDADSDSDADSDSDSDSDSDADSDSDADSDSDADSDSDADSDSDSDSDSDADSDSDSDSDSDADSDSDADSDSDADSDSDADSDSDSDSDSDADSDSDSDSDSDSDADSDSDSDSDADSDSDADSDSDADSDSDADSDSDSDSDSDSDSDSDSDSDRDSDADSDSDADSDSDSDSDSDADSDSDSDSDSDADSDSDADSDSDSDADSDSDSDSDSDADSDSDADSDSDADSDSDADSDSDSDSDSDSDSDSDADSDSDADSDSDADRDHNDKTDKPNNKELPDTGNDAQNNGTLFGSLFAALGGLFLVGRRRKNKNNEEK

SEQ ID NO: 59 - protein, 453 aa, Staphylococcus aureus
MKSLKTVIGMNNKEHIKSVILALLVLMSVVLTYMVWNFSPDIANVDNTDSKKSETKPLTTPMTAKMDTTITPFQIIHSKNDHPEGTIATVSNVNKLTKPLKNKEVKSVEHVRRDHNLMIPDLNSDFILFDFTYDLPLSTYLGQVLNMNAKVPNHFNFNRLVIDHDADDNIVLYAISKDRHDYVKLTTTTKNDHFLDALAAVKKDMQPYTDIITNKDTIDRTTHVFAPSKPEKLKTYRMVFNTISVEKMNAILFDDSTIVRSSKSGVTTYNNNTGVANYNDKNEKYHYKNLSEDEASSSKMEETIPGTFDFINGHGGFLNEDFRLFSTNNQSGELTYQRFLNGYPTFNKEGSNQIQVTWGEKGVFDYRRSLLRTDVVLNSEDNKSLPKLESVRSSLANNSDINFEKVTNIAIGYEMQDNSDHNHIEVQINSELVPRWYVEYDGEWYVYNDGRLE

SEQ ID NO: 60 - protein, 2261 aa, Staphylococcus aureus
MSKRQKAFHDSLANEKTRVRLYKSGKNWVKSGIKEIEMFKIMGLPFISHSLVSQDNQSISKKMTGYGLKTTAVIGGAFTVNMLHDQQAFAASDAPLTSELNTQSETVGNQNSTTIEASTSTADSTSVTKNSSSVQTSNSDTVSSEKSEKVTSTTNSTSNQQEKLTSTSESTSSKNTTSSSDTKSVASTSSTEQPINTSTNQSTASNNTSQSTTPSSVNLNKTSTTSTSTAPVKLRTFSRLAMSTFASAATTTAVTANTITVNKDNLKQYMTTSGNATYDQSTGIVTLTQDAYSQKGAITLGTRIDSNKSFHFSGKVNLGNKYEGHGNGGDGIGFAFSPGVLGETGLNGAAVGIGGLSNAFGFKLDTYHNTSKPNSAAKANADPSNVAGGGAFGAFVTTDSYGVATTYTSSSTADNAAKLNVQPTNNTFQDFDINYNGDTKVMTVKYAGQTWTRNISDWIAKSGTTNFSLSMTASTGGATNLQQVQFGTFEYTESAVTQVRYVDVTTGKDIIPPKTYSGNVDQVVTIDNQQSALTAKGYNYTSVDSSYASTYNDTNKTVKMTNAGQSVTYYFTDVKAPTVTVGNQTIEVGKTMNPIVLTTTDNGTGTVTNTVTGLPSGLSYDSATNSIIGTPTKIGQSTVTVVSTDQANNKSTTTFTINVVDTTAPTVTPIGDQSSEVYSPISPIKIATQDNSGNAVTNTVTGLPSGLTFDSTNNTISGTPTNIGTSTISIVSTDASGNKTTTTFKYEVTRNSMSDSVSTSGSTQQSQSVSTSKADSQSASTSTSGSIVVSTSASTSKSTSVSLSDSVSASKSLSTSESNSVSSSTSTSLVNSQSVSSSMSDSASKSTSLSDSISNSSSTEKSESLSTSTSDSLRTSTSLSDSLSMSTSGSLSKSQSLSTSISGSSSTSASLSDSTSNAISTSTSLSESASTSDSISISNSIANSQSASTSKSDSQSTSISLSTSDSKSMSTSESLSDSTSTSGSVSGSLSIAASQSVSTSTSDSMSTSEIVSDSISTSGSLSASDSKSMSVSSSMSTSQSGSTSESLSDSQSTSDSDSKSLSQSTSQSGSTSTSTSTSASVRTSESQSTSGSMSASQSDSMSISTSFSDSTSDSKSASTASSESISQSASTSTSGSVSTSTSLSTSNSERTSTSMSDSTSLSTSESDSISESTSTSDSISEAISASESTFISLSESNSTSDSESQSASAFLSESLSESTSESTSESVSSSTSESTSLSDSTSESGSTSTSLSNSTSGSTSISTSTSISESTSTFKSESVSTSLSMSTSTSLSDSTSLSTSLSDSTSDSKSDSLSTSMSTSDSISTSKSDSISTSTSLSGSTSESKSDSTSMSISMSQSTSGSTSTSTSTSLSDSTSTSLSLSASMNQSGVDSNSASQSASNSTSTSTSESDSQSTSSYTSQSTSQSESTSTSTSLSDSTSISKSTSQSGSVSTSASLSGSESESDSQSISTSASESTSESASTSLSDSTSTSNSGSASTSTSLSNSASASESDLSSTSLSDSTSASMQSSESDSQSTSASLSDSLSTSTSNRMSTIASLSTSVSTSESGSTSESTSESDSTSTSLSDSQSTSRSTSASGSASTSTSTSDSRSTSASTSTSMRTSTSDSQSMSLSTSTSTSMSDSTSLSDSVSDSTSDSTSASTSGSMSVSISLSDSTSTSTSASEVMSASISDSQSMSESVNDSESVSESNSESDSKSMSGSTSVSDSGSLSVSTSLRKSESVSESSSLSCSQSMSDSVSTSDSSSLSVSTSLRSSESVSESDSLSDSKSTSGSTSTSTSGSLSTSTSLSGSESVSESTSLSDSISMSDSTSTSDSDSLSGSISLSGSTSLSTSDSLSDSKSLSSSQSMSGSESTSTSVSDSQSSSTSNSQFDSMSISASESDSMSTSDSSSISGSNSTSTSLSTSDSMSGSVSVSTSTSLSDSISGSTSVSDSSSTSTSTSLSDSMSQSQSTSTSASGSLSTSISTSMSMSASTSSSQSTSVSTSLSTSDSISDSTSISISGSQSTVESESTSDSTSISDSESLSTSDSDSTSTSTSDSTSGSTSTSISESLSTSGSGSTSVSDSTSMSESNSSSVSMSQDKSDSTSISDSESVSTSTSTSLSTSDSTSTSESLSTSMSGSQSISDSTSTSMSGSTSTSESNSMHPSDSMSMHHTHSTSTSRLSSEATTSTSESQSTLSATSEVTKHNGTPAQSEKRLPDTGDSIKQNGLLGGVMTLLVGLGLMKRKKKKDENDQDDSQA

SEQ ID NO: 61 - protein, 619 aa, Staphylococcus aureus
MPKNKILIYLLSTTLVLPTLVSPTAYADTPQKDTTAKTTSHDSKKSNDDETSKDTTSKDIDKADKNNTSNQDNNDKKFKTIDDSTSDSNNIIDFIYKNLPQTNINQLLTKNKYDDNYSLTTLIQNLFNLNSDISDYEQPRNGEKSTNDSNKNSDNSIKNDTDTQSSKQDKADNQKAPKSNNTKPSTSNKQPNSPKPTQPNQSNSQPASDDKANQKSSSKDNQSMSDSALDSILDQYSEDAKKTQKDYASQSKKDKNEKSNTKNPQLPTQDELKHKSKPAQSFNNDVNQKDTRATSLFETDPSISNNDDSGQFNVVDSKDTRQFVKSIAKDAHRIGQDNDIYASVMIAQAILESDSGRSALAKSPNHNLFGIKGAFEGNSVPFNTLEADGNQLYSINAGFRKYPSTKESLKDYSDLIKNGIDGNRTIYKPTWKSEADSYKDATSHLSKTYATDPNYAKKLNSIIKHYQLTQFDDERMPDLDKYERSIKDYDDSSDEFKPFREVSDSMPYPHGQCTWYVYNRMKQFGTSISGDLGDAHNWNNRAQYRDYQVSHTPKRHAAVVFEAGQFGADQHYGHVAFVEKVNSDGSIVISESNVKGLGIISHRTINAAAAEELSYITGK

SEQ ID NO: 62 - protein, 509 aa, Staphylococcus aureus
MRKFSRYAFTSMAALTLLSTLSPAALAIDSKNKPANSDIKFEVTQKSDAVKALKELPKSENVKNIYQDYAVTDVKTDKKGFTHYTLQPSVDGVHAPDKEVKVHADKSGKVVLINGDTDAKKVKPTNKVTLSKDDAADKAFKAVKIDKNKAKNLKDKVIKENKVEIDGDSNKYVYNVELITVTPEISHWKVKIDAQTGEILEKMNLVKEAAETGKGKGVLGDTKDININSIDGGFSLEDLTHQGKLSAFSFNDQTGQATLITNEDENFVKDEQRAGVDANYYAKQTYDYYKDTFGRESYDNQGSPIVSLTHVNNYGGQDNRNNAAWIGDKMIYGDGDGRTFTSLSGANDVVAHELTHGVTQETANLEYKDQSGALNESFSDVFGYFVDDEDFLMGEDVYTPGKEGDALRSMSNPEQFGQPAHMKDYVFTEKDNGGVHTNSGIPNKAAYNVIQAIGKSKSEQIYYRALTEYLTSNSNFKDCKDALYQAAKDLYDEQTAEQVYEAWNEVGVE

SEQ ID NO: 63 - protein, 913 aa, Staphylococcus aureus
MKKRIDYLSNKQNKYSIRRFTVGTTSVIVGATILFGIGNHQAQASEQSNDTTQSSKNNASADSEKNNMIETPQLNTTANDTSDISANTNSANVDSTTKPMSTQTSNTTTTEPASTNETPQPTAIKNQATAAKMQDQTVPQEANSQVDNKTTNDANSIATNSELKNSQTLDLPQSSPQTISNAQGTSKPSVRTRAVRSLAVAEPVVNAADAKGTNVNDKVTASNFKLEKTTFDPNQSGNTFMAANFTVTDKVKSGDYFTAKLPDSLTGNGDVDYSNSNNTMPIADIKSTNGDVVAKATYDILTKTYTFVFTDYVNNKENINGQFSLPLFTDRAKAPKSGTYDANINIADEMFNNKITYNYSSPIAGIDKPNGANISSQIIGVDTASGQNTYKQTVFVNPKQRVLGNTWVYIKGYQDKIEESSGKVSATDTKLRIFEVNDTSKLSDSYYADPNDSNLKEVTDQFKNRIYYEHPNVASIKFGDITKTYVVLVEGHYDNTGKNLKTQVIQENVDPVTNRDYSIFGWNNENVVRYGGGSADGDSAVNPKDPTPGPPVDPEPSPDPEPEPTPDPEPSPDPEPEPSPDPDPDSDSDSDSGSDSDSGSDSDSESDSDSDSDSDSDSDSDSESDSDSESDSDSDSDSDSDSDSDSDSDSDSDSDSDSDSDSDSESDSDSESDSESDSDSDSDSDSDSDSDSDSDSDSDSDSDSDSDSDSDSDSDSDSDSDSDSDSDSDSDSDSDSDSDSDSDSDSDSDSDSDSDSDSDSDSDSDSDSDSDSDSDSDSDSDSDSDSDSDSDSDSDSDSDSDSDSDSDSDSDSDSDSDSDSDSDSDSDSDSDSDSDSDSDSRVTPPNNEQKAPSNPKGEVNHSNKVSKQHKTDALPETGDKSENTNATLFGAMMALLGSLLLFRKRKQDHKEKA

SEQ ID NO: 64 - protein, 233 aa, Staphylococcus aureus
MKKTIMASSLAVALGVTGYAAGTGHQAHAAEVNVDQAHLVDLAHNHQDQLNAAPIKDGAYDIHFVKDGFQYNFTSNGTTWSWSYEAANGQTAGFSNVAGADYTTSYNQGSNVQSVSYNAQSSNSNVEAVSAPTYHNYSTSTTSSSVRLSNGNTAGATGSSAAQIMAQRTGVSASTWAAIIARESNGQVNAYNPSGASGLFQTMPGWGPTNTVDQQINAAVKAYKAQGLGAWGF

SEQ ID NO: 65 - protein, 261 aa, Staphylococcus aureus
MGGYLIMKKIVTATIATAGLATIAFAGHDAQAAEQNNNGYNSNDAQSYSYTYTIDAQGNYHYTWTGNWNPSQLTQNNTYYYNNYNTYSYNNASYNNYYNHSYQYNNYTNNSQTATNNYYTGGSGASYSTTSNNVHVTTTAAPSSNGRSISNGYASGSNLYTSGQCTYYVFDRVGGKIGSTWGNASNWANAAASSGYTVNNTPKVGAIMQTTQGYYGHVAYVEGVNSNGSVRVSEMNYGHGAGVVTSRTISANQAGSYNFIH

SEQ ID NO: 66 - protein, 802 aa, Staphylococcus aureus
MANTKKTTLDITGMTCAACSNRIEKKLNKLDDVNAQVNLTTEKATVEYNPDQHDVQEFINTIQHLGYGVAVETVELDITGMTCAACSSRIEKVLNKMDGVQNATVNLTTEQAKVDYYPEETDADKLVTRIQKLGYDASIKDNNKDQTSRKAEALQHKLIKLIISAVLSLPLLMLMFVHLFNMHIPALFTNPWFQFILATPVQFIIGWQFYVGAYKNLRNGGANMDVLVAVGTSAAYFYSIYEMVRWLNGSTTQPHLYFETSAVLITLILFGKYLEARAKSQTTNALGELLSLQAKEARILKDGNEVMIPLNEVHVGDTLIVKPGEKIPVDGKIIKGMTAIDESMLTGESIPVEKNVDDTVIGSTMNKNGTITMTATKVGGDTALANIIKVVEEAQSSKAPIQRLADIISGYFVPIVVGIALLTFIVWITLVTPGTFEPALVASISVLVIACPCALGLATPTSIMVGTGRAAENGILFKGGEFVERTHQIDTIVLDKTGTITNGRPVVTDYHGDNQTLQLLATAEKDSEHPLAEAIVNYAKEKQLILTETTTFKAVPGHGIEATIDHHHILVGNRKLMADNDISLPKHISDDLTHYERDGKTAMLIAVNYSLTGIIAVADTVKDHAKDAIKQLHDMGIEVAMLTGDNKNTAQAIAKQVGIDTVIADILPEEKAAQIAKLQQQGKKVAMVGDGVNDAPALVKADIGIAIGTGTEVAIEAADITILGGDLMLIPKAIYASKATIRNIRQNLFWAFGYNIAGIPIAALGLLAPWVAGAAMALSSVSVVTNALRLKKMRLEPRRKDA

SEQ ID NO: 67 - protein, 299 aa, Staphylococcus aureus
MFDSIRETIDYAVENNMSFADIMVKEEMELSGKSRDEVRAQMKQNLDVMRDAVIKGTTGDGVESVTGYTGHDAAKLRDYNETHHALSGYEMIDAVKGAIATNEVNAAMGIICATPTAGSSGTIPGALFKLEKTHDLTEEQMIDFLFTSALFGRVVANNASVAGATGGCQAEVGSASAMAAAAAVAIFGGSPEASGHAMALAISNLLGLVCDPVAGLVEIPCVMRNAIGSGNALISADLALAGIESRIPVDEVIEAMDKVGRNLPASLRETGLGGLAGTPTGEAIKRKIFGTAEDMVKNN

SEQ ID NO: 68 - protein, 1018 aa, Staphylococcus aureus
MKNNLRYGIRKHKLGAASVFLGTMIVVGMGQDKEAAASEQKTTTVEENGNSATDNKTSETQTTATNVNHIEETQSYNATVTEQPSNATQVTTEEAPKAVQAPQTAQPANIETVKEEVVKEEAKPQVKETTQSQDNSGDQRQVDLTPKKATQNQVAETQVEVAQPRTASESKPRVTRSADVAEAKEASNAKVETGTDVTSKVTVEIGSIEGHNNTNKVEPHAGQRAVLKYKLKFENGLHQGDYFDFTLSNNVNTHGVSTARKVPEIKNGSVVMATGEVLEGGKIRYTFTNDIEDKVDVTAELEINLFIDPKTVQTNGNQTITSTLNEEQTSKELDVKYKDGIGNYYANLNGSIETFNKANNRFSHVAFIKPNNGKTTSVTVTGTLMKGSNQNGNQPKVRIFEYLGNNEDIAKSVYANTTDTSKFKEVTSNMSGNLNLQNNGSYSLNIENLDKTYVVHYDGEYLNGTDEVDFRTQMVGHPEQLYKYYYDRGYTLTWDNGLVLYSNKANGNGKNGPIIQNNKFEYKEDTIKETLTGQYDKNLVTTVEEEYDSSTLDIDYHTAIDGGGGYVDGYIETIEETDSSAIDIDYHTAVDSEAGHVGGYTESSEESNPIDFEESTHENSKHHADVVEYEEDTNPGGGQVTTESNLVEFDEESTKGIVTGAVSDHTTVEDTKEYTTESNLIELVDELPEEHGQAQGPVEEITENNHHISHSGLGTENGHGNYDVIEEIEENSHVDIKSELGYEGGQNSGNQSFEEDTEEDKPKYEQGGNIVDIDFDSVPQIHGQNKGNQSFEEDTEKDKPKYEHGGNIIDIDFDSVPHIHGFNKHTEIIEEDTNKDKPSYQFGGHNSVDFEEDTLPKVSGQNEGQQTIEEDTTPPIVPPTPPTPEVPSEPETPTPPTPEVPSEPETPTPPTPEVPSEPETPTPPTPEVPAEPGKPVPPAKEEPKKPSKPVEQGKVVTPVIEINEKVKAVAPTKKPQSKKSELPETGGEESTNKGMLFGGLFSILGLALLRRNKKNHKA

SEQ ID NO: 69 - protein, 948 aa, Staphylococcus aureus
LHLRENIIVKSNLRYGIRKHKLGAASVFLGTMIVVGMGQEKEAAASEQNNTTVEESGSSATESKASETQTTTNNVNTIDETQSYSATSTEQPSQSTQVTTEEAPKTVQAPKVETSRVDLPSEKVADKETTGTQVDIAQPSNVSEIKPRMKRSTDVTAVAEKEVVEETKATGTDVTNKVEVEEGSEIVGHKQDTNVVNPHNAERVTLKYKWKFGEGIKAGDYFDFTLSDNVETHGISTLRKVPEIKSTDGQVMATGEIIGERKVRYTFKEYVQEKKDLTAELSLNLFIDPTTVTQKGNQNVEVKLGETTVSKIFNIQYLGGVRDNWGVTANGRIDTLNKVDGKFSHFAYMKPNNQSLSSVTVTGQVTKGNKPGVNNPTVKVYKHIGSDDLAESVYAKLDDVSKFEDVTDNMSLDFDTNGGYSLNFNNLDQSKNYVIKYEGYYDSNASNLEFQTHLFGYYNYYYTSNLTWKNGVAFYSNNAQGDGKDKLKEPIIEHSTPIELEFKSEPPVEKHELTGTIEESNDSKPIDFEYHTAVEGAEGHAEGTIETEEDSIHVDFEESTHENSKHHADVVEYEEDTNPGGGQVTTESNLVEFDEDSTKGIVTGAVSDHTTIEDTKEYTTESNLIELVDELPEEHGQAQGPIEEITENNHHISHSGLGTENGHGNYGVIEEIEENSHVDIKSELGYEGGQNSGNQSFEEDTEEDKPKYEQGGNIVDIDFDSVPQIHGQNNGNQSFEEDTEKDKPKYEQGGNIIDIDFDSVPHIHGFNKHTEIIEEDTNKDKPNYQFGGHNSVDFEEDTLPQVSGHNEGQQTIEEDTTPPIVPPTPPTPEVPSEPETPTPPTPEVPSEPETPTPPTPEVPTEPGKPIPPAKEEPKKPSKPVEQGKVVTPVIEINEKVKAVVPTKKAQSKKSELPETGGEESTNNGMLFGGLFSILGLALLRRNKKNHKA

SEQ ID NO: 70 - protein, 1117 aa, Staphylococcus aureus
  MOD_RES (566): X = anything
MQMRDKKGPVNKRVDFLSNKLNKYSIRKFTVGTASILIGSLMYLGTQQEAEAAENNIENPTTLKDNVQSKEVKIEEVTNKDTAPQGVEAKSEVTSNKDTIEHEPSVKAEDISKKEDTPKEVADVAEVQPKSSVTHNAETPKVRKARSVDEGSFDITRDSKNVVESTPITIQGKEHFEGYGSVDIQKKPTDLGVSEVTRFNVGNESNGLIGALQLKNKIDFSKDFNFKVRVANNHQSNTTGADGWGFLFSKGNAEEYLTNGGILGDKGLVNSGGFKIDTGYIYTSSMDKTEKQAGQGYRGYGAFVKNDSSGNSQMVGENIDKSKTNFLNYADNSTNTSDGKFHGQRLNDVILTYVASTGKMRAEYAGKTWETSITDLGLSKNQAYNFLITSSQRWGLNQGINANGWMRTDLKGSEFTFTPEAPKTITELEKKVEEIPFKKERKFNPDLAPGTEKVTREGQKGEKTITTPTLKNPLTGVIISKGEPKEEITKDPINELTEYGPETIAPGHRDEFDPKLPTGEKEEVPGKPGIKNPETGDVVRPPVDSVTKYGPVKGDSIVEKEEIPFXKERKFNPDLAPGTEKVTREGQKGEKTITTPTLKNPLTGEIISKGESKEEITKDPINELTEYGPETITPGHRDEFDPKLPTGEKEEVPGKPGIKNPETGDVVRPPVDSVTKYGPVKGDSIVEKEEIPFKKERKFNPDLAPGTEKVTREGQKGEKTITTPTLKNPLTGEIISKGESKEEITKDPINELTEYGPETITPGHRDEFDPKLPTGEKEEVPGKPGIKNPETGDVVRPPVDSVTKYGPVKGDSIVEKEEIPFEKERKFNPDLAPGTEKVTREGQKGEKTITTPTLKNPLTGEIISKGESKEEITKDPVNELTEFGGEKIPQGHKDIFDPNLPTDQTEKVPGKPGIKNPDTGKVIEEPVDDVIKHGPKTGTPETKTVEIPFETKREFNPKLQPGEERVKQEGQPGSKTITTPITVNPLTGEKVGEGQPTEEITKQPVDKIVEFGGEKPKDPKGPENPEKPSRPTHPSGPVNPNNPGLSKDRAKPNGPVHSMDKNDKVKKSKIAKESVANQEKKRAELPKTGLESTQKGLIFSSIIGIAGLMLLARRRKN

SEQ ID NO: 71 - protein, 436 aa, Staphylococcus aureus [sequence omitted]

SEQ ID NO: 72 - protein, 348 aa, Staphylococcus aureus
MAVFSKEKKRGCIVVIETFKAFVIDKDESGKVTPTFKQLSPTDLPKGDVLIKVHYSGINYKDALATQDHNAVVKSYPMIPGIDLAGTIVESEAPGFEKGEQVIVTSYDLGVSHYGGFSEYARVKSEWIIKLPDTLTLEESMIYGTAGYTAGLAIERLEKVGMNIEDGPVLVRGASGGVGTLAVLMLNELGYKVIASTGKQDVSDQLLELGAKEVIDRLPVEDDHKKPLASSTWQACVDPVGGEGINYVTKRLNHSGSIAVIGMTAGNTYTNSVFPHILRGVNILGIDSVFTAMKLRQRVWRRLAKDLMPENLHEIKQVITFDELPEQLNKVIKHENKGRIVIDFGVDK

SEQ ID NO: 73 - protein, 166 aa, Staphylococcus aureus
MKKLVTATTLTAGIGTALVGQAYHADAAENYTNYNNYNYNTTQTTTTTTTTTTTSSISHSGNLYTAGQCTWYVYDKVGGEIGSTWGNANNWAAAAQGAGFTVNHTPSKGAILQSSEGPFGHVAYVESVNSDGSVTISEMNYSGGPFSVSSRTISASEAGNYNYIHI

SEQ ID NO: 74 - protein, 267 aa, Staphylococcus aureus
MKKIATATIATAGFATIAIASGNQAHASEQDNYGYNPNDPTSYSYTYTIDAQGNYHYTWKGNWHPSQLNQDNGYYSYYYYNGYNNYNNYNNGYSYNNYSRYNNYSNNNQSYNYNNYNSYNTNSYRTGGLGASYSTSSNNVQVTTTMAPSSNGRSISSGYTSGRNLYTSGQCTYYVFDRVGGKIGSTWGNASNWANAAARAGYTVNNTPKAGAIMQTTQGAYGHVAYVESVNSNGSVRVSEMNYGYGPGVVTSRTISASQAAGYNFIH

SEQ ID NO: 75 - protein, 809 aa, Staphylococcus aureus
  MOD_RES (277)..(277): X = anything
MSMTYRIKKWQKLSTITLLMAGVITLNGGEFRSVDKHQIAVADTNVQTPDYEKLRNTWLDVNYGYDKYDENNPDMKKKFDATEKEATNLLKEMKTESGRKYLWSGAETLETNSSHMTRTYRNIEKIAEAMRNPKTTLNTDENKKKVKDALEWLHKNAYGKEPDKKVKELSENFTKTTGKNTNLNWWDYEIGTPKSLTNTLILLNDQFSNEEKKKFTAPIKTFAPDSDKILSSVGKAELAKGGNLVDISKVKLLECIIEEDKDMMKKSIDSFNKVFTXVQDSATGKERNGFYKDGSYIDHQDVPYTGAYGVVLLEGISQMMPMIKETPFNDKTQNDTTLKSWIDDGFMPLIYKGEMMDLSRGRAISRENETSHSASATVMKSLLRLSDAMDDSTKAKYKKIVKSSVESDSSYKQNDYLNSYSDIDKMKSLMTDNSISKNGLTQQLKIYNDMDRVTYHNKDLDFAFGLSMTSKNVARYESINGENLKGWHTGAGMSYLYNSDVKHYHDNFWVTADMKRLSGTTTLDNEILKDTDDKKSSKTFVGGTKVDDQHASIGMDFENQDKTLTAKKSYFILNDKIVFLGTGIKSTDSSKNPVTTIENRKANGYTLYTDDKQTTNSDNQENNSVFLESTDTKKNIGYHFLNKPKITVKKESHTGKWKEINKSQKDTQKTDEYYEVTQKHSNSDNKYGYVLYPGLSKDVFKTKKDEVTVVKQEDDFHVVKDNESVWAGVNYSNSTQTFDINNTKVEVKAKGMFILKKKDDNTYECSFYNPESTNSASDIESKISMTGYSITNKNTSTSNESGVHFELTK

SEQ ID NO: 76 - protein, 79 aa, Staphylococcus aureus
MNDLKQFLYIALVCGVIAGLGAFLHIPQYPSMTIPRIVAILGIISAMLTFKDKQISASLKFSALLINVLPLCGTFVASN

SEQ ID NO: 77 - protein, 423 aa, Staphylococcus aureus
VSREMSYHWFKKMLLSTSILILSSSSLGLATHTVEAKDNLNGEKPTTNLNHNITSPSVNSEMNNNETGTPHESNQTGNEGTGSNSRDANPDSNNVKPDSNNQNPSTDSKPDPNNQNPSPNPKPDPDNPKPKPDPKPDPDKPKPNPDPKPDPDNPKPNPDPKPDPDKPKPNPDPKPDPDKPKPNPNPKPDPNKPNPNPSPDPDQPGDSNHSGGSKNGGTWNPNASDGSNQGQWQPNGNQGNSQNPTGNDFVSQRFLALANGAYKYNPYILNQINKLGKDYGEVTDEDIYNIIRKQNFSGNAYLNGLQQQSNYFRFQYFNPLKSERYYRNLDEQVLALITGEIGSMPDLKKPEDKPDSKQRSFEPHEKDDFTVVKKQEDNKKSASTAYSKSWLAIVCSMMVVFSIMLFLFVKRNKKKNKNESQRR

SEQ ID NO: 78 - protein, 351 aa, Staphylococcus aureus
MKNKKRVLIASSLSCAILLLSAATTQANSAHKDSQDQNKKEHVDKSQQKDKRNVTNKDKNSTAPDDIGKNGKITKRTETVYDEKTNILQNLQFDFIDDPTYDKNVLLVKKQGSIHSNLKFESHKEEKNSNWLKYPSEYHVDFQVKRNRKTEILDQLPKNKISTAKVDSTFSYSSGGKFDSTKGIGRTSSNSYSKTISYNQQNYDTIASGKNNNWHVHWSVIANDLKYGGEVKNRNDELLFYRNTRIATVENPELSFASKYRYPALVRSGFNPEFLTYLSNEKSNEKTQFEVTYTRNQDILKNRPGIHYAPPILEKNKDGQRLIVTYEVDWKNKTVKVVDKYSDDNKPYKEG

SEQ ID NO: 79 - protein, 290 aa, Staphylococcus aureus
MYTRTATTSDSQKNITQSLQFNFLTEPNYDKETVFIKAKGTIGSGLRILDPNGYWNSTLRWPGSYSVSIQNVDDNNNTNVTDFAPKNQDESREVKYTYGYKTGGDFSINRGGLTGNITKESNYSETISYQQPSYRTLLDQSTSHKGVGWKVEAHLINNMGHDHTRQLTNDSDNRTKSEIFSLTRNGNLWAKDNFTPKDKMPVTVSEGFNPEFLAVMSHDKKDKGKSQFVVHYKRSMDEFKIDWNRHGFWGYWSGENHVDKKEEKLSALYEVDWKTHNVKFVKVLNDNEKK

SEQ ID NO: 80 - protein, 212 aa, Staphylococcus aureus
  MOD_RES (172): X = anything
VVKFMNYPNGKPYRKNSAIDGGKKTAAFSNIEYGGRGMSLEKDIEHSNTFYLKSDIAVIHKKPTPVQIVNVNYPKRSKAVINEAYFRTPSTTDYNGVYQGYYIDFEAKETKNKTSFPLNNIHDHQVEHMKNAYQQKGIVFLMIRFKTLDEVYLLPYSKFEVFWKRYKDNIKXSITVDEIRKNGYHIPYQYQPRLDYLKAVDKLILDESEDRV

SEQ ID NO: 81 - protein, 1992 aa, Staphylococcus aureus
  MOD_RES (1222)..(1225): X = anything
VNTTKAALHGDVKLQNDKDHAKQTVSQLAHLNNAQKHMEDTLIDSETTRTAVKQDLTEAQALDQLMDALQQSIADKDATRASSAYVNAEPNKKQSYDEAVQNAESIIAGLNNPTINKGNVSSATQAVISSKNALDGVERLAQDKQTAGNSLNHLDQLTPAQQQALENQINNATTRGEVAQKLTEAQALNQAMEALRNSIQDQQQTEAGSKFINEDKPQKDAYQAAVQNAKDLINQTNNPTLDKAQVEQLTQAVNQAKDNLHGDQKLADDKQHAVTDLNQLNGLNNPQRQALESQINNAATRGEVAQKLAEAKALDQAMQALRNSIQDQQQTESGSKFINEDKPQKDAYQAAVQNAKDLINQTGNPTLDKSQVEQLTQAVTTAKDNLHGDQKLARDQQQAVTTVNALPNLNHAQQQALTDAINAAPTRTEVAQHVQTATELDHAMETLKNKVDQVNTDKAQPNYTEASTDKKEAVDQALQAAESITDPTNGSNANKDAVDQVLTKLQEKENELNGNERVAEAKTQAKQTIDQLTHLNADQIATAKQNIDQATKLQPIAELVDQATQLNQSMDQLQQAVNEHANVEQTVDYTQADSDKQNAYKQAIADAENVLKQNANKQQVDQALQNILNAKQALNGDERVALAKTNGKHDIDQLNALNNAQQDGFKGRIDQSNDLNQIQQIVDEAKALNRAMDQLSQEITDNEGRTKGSTNYVNADTQVKQVYDETVDKAKQALDKSTGQNLTAKQVIKLNDAVTAAKKALNGEERLNNRKAEALQRLDQLTHLNNAQRQLAIQQINNAETLNKASRAINRATKLDNAMGAVQQYIDEQHLGVISSTNYINADDNLKANYDNAIANAAHELDKVQGNAIAKAEAEQLKQNIIDAQNALNGDQNLANAKDKANAFVNSLNGLNQQQQDLAHKAINNADTVSDVTDIVNNQIDLNDAMETLKHLVDNEIPNAEQTVNYQNADDNAKTNFDDAKRLANTLLNSDNTNVNDINGAIQAVNDAIHNLNGDQRLQDAKDKAIQSINQALANKLKEIEASNATDQDKLIAKNKAEELANSIINNINKATSNQAVSQVQTAGNHAIEQVHANEIPKAKIDANKDVDKQVQALIDEIDRNPNLTDKEKQALKDRINQILQQGHNGINNAMTKEEIEQAKAQLAQALQDIKDLVKAKEDAKQDVDKQVQALIDEIDQNPNLTDKEKQALKDRINQILQQGHXDIXNAMTKEAIEQAKERLAQALQDIKDLVKAKEDAKNDIDKRVQALIDEIDQNPNLTDKEKQALKDRINQILQQGHNDINNALTKEEIEQAKAQLAQALQDIKDLVKAKEDAKNAIKALANAKRDQINSNPDLTPEQKAKALKEIDEAEKRALQNVENAQTIDQLNRGLNLGLDDIRNTHVWEVDEQPAVNEIFEATPEQILVNGELIVHRDDIITEQDILAHINLIDQLSAEVIDTPSTATISDSLTAKVEVTLLDGSKVIVNVPVKVVEKELSVVKQQAIESIENAAQQKINEINNSVTLTLEQKEAAIAEVNKLKQQAIDHVNNAPDVHSVEEIQQQEQAHIEQFNPEQFTIEQAKSNAIKSIEDAIQHMIDEIKARTDLTDKEKQEAIAKLNQLKEQAIQAIQRAQSIDEISEQLEQFKAQMKAANPTAKELAKRKQEAISRIKDFSNEKINSIRNSEIGTADEKQAAMNQINEIVLETIRDINNAHTLQQVEAALNNGIARISAVQIVTSDRAKQSSSTGNESNSHLTIGYGTANHPFNSSTIGHKKKLDEDDDIDPLHMRHFSNNFGNVIKNAIGVVGISGLLASFWFFIAKRRRKEDEEEELEIRDNNKDSIKETLDDTKHLPLLFAKRRRKEDEEDVTVEEKDSLNNGESLDKVKHTPFFLPKRRRKEDEEDVEVTNENTDEKVLKDNEHSPLLFAKRRKDKEEDVETTTSIESKDEDVPLLLAKKKNQKDNQSKDKKSASKNTSKKVAAKKKKKKAKKNKK

SEQ ID NO: 82 - protein, 840 aa, Staphylococcus aureus
MNQEVKNKIFSILKITFATALFIFVAITLYRELSGINFKDTLVEFSKINRMSLVLLFIGGGASLVILSMYDVILSRALKMDISLGKVLRVSYIINALNAIVGFGGFIGAGVRAMVYKNYTHDKKKLVHFISLILISMLTGLSLLSLLIVFHVFDASLILDKITWVRWVLYVVSFFLPLFIIYSMVRPPDKNNRFVGLYCTLVSCVEWLAAAVVLYFCGVIVDAHVSFMSFIAIFIIAALSGLVSFIPGGFGAFDLVVLLGFKTLGVPEEKVLLMLLLYRFAYYFVPVIIALILSSFEFGTSAKKYIEGSKYFIPAKDVTSFLMSYQKDIIAKIPSLSLAILVFFTSMIFFVNNLTIVYDALYDGNHLTYYILLAIHTSACLLLLLNVVGIYKQSRRAIIFAMISILLITVATFFTYASYILITWLAIIFVLLIVAFRRARRLKRPVRMRNIVAMLLFSLFILYVNHIFIAGTLYALDIYTIEMHTSVLRYYFWLTILIIAIIIGMIAWLFDYQFSKVRISSKIEDCEEIINQYGGNYLSHLIYSGDKQFFTNENKTAFLMYRYKASSLVVLGDPLGDENAFDELLEAFYNYAEYLGYDVIFYQVTDQHMPLYHNFGNQFFKLGEEAIIDLTQFSTSGKKRRGFRATLNKFDELNISFEIIEPPFSTEFINELQHVSDLWLDNRQEMHFSVGEFNEEYLSKAPIGVMRNEENEVIAFCSLMPTYFNDAISVDLIRWLPELDLPLMDGLYLHMLLWSKEQGYTKFNMGMATLSNVGQLHYSYLRERLAGRVFEHFNGLYRFQGLRRYKSKYNPNWEPRFLVYRKDNSLWESLSKVMRVIRHK

SEQ ID NO: 83 - protein, 1245 aa, Staphylococcus aureus
MVALTLVGSAVTAHQVQAAETTQDQTTNKNVLDSNKVKATTEQAKAEVKNPTQNISGTQVYQDPAIVQPKTANNKTGNAQVSQKVDTAQVNGDTRANQSATTNNTQPVAKSTSTTAPKTNTNVTNAGYSLVDDEDDNSENQINPELIKSAAKPAALETQYKTAAPKAATTSAPKAKTEATPKVTTFSASAQPRSVAATPKTSLPKYKPQVNSSINDYIRKNNLKAPKIEEDYTSYFPKYAYRNGVGRPEGIVVHDTANDRSTINGEISYMKNNYQNAFVHAFVDGDRIIETAPTDYLSWGVGAVGNPRFINVEIVHTHDYASFARSMNNYADYAATQLQYYGLKPDSAEYDGNGTVWTHYAVSKYLGGTDHADPHGYLRSHNYSYDQLYDLINEKYLIKMGKVAPWGTQSTTTPTTPSKPTTPSKPSTGKLTVAANNGVAQIKPTNSGLYTTVYDKTGKATNEVQKTFAVSKTATLGNQKFYLVQDYNSGNKFGWVKEGDVVYNTAKSPVNVNQSYSIKPGTKLYTVPWGTSKQVAGSVSGSGNQTFKASKQQQIDKSIYLYGSVNGKSGWVSKAYLVDTAKPTPTPTPKPSTPTTNNKLTVSSLNGVAQINAKNNGLFTTVYDKTGKPTKEVQKTFAVTKEASLGGNKFYLVKDYNSPTLIGWVKQGDVIYNNAKSPVNVMQTYTVKPGTKLYSVPWGTYKQEAGAVSGTGNQTFKATKQQQIDKSIYLFGTVNGKSGWVSKAYLAVPAAPKKAVAQPKTAVKAYTVTKPQTTQTVSKIAQVKPNNTGIRASVYEKTAKNGAKYADRTFYVTKERAHGNETYVLLNNTSHNIPLGWFNVKDLNVQNLGKEVKTTQKYTVNKSNNGLSMVPWGTKNQVILTGNNIAQGTFNATKQVSVGKDVYLYGTINNRTGWVNAKDLTAPTAVKPTTSAAKDYNYTYVIKNGNGYYYVTPNSDTAKYSLKAFNEQPFAVVKEQVINGQTWYYGKLSNGKLAWIKSTDLAKELIKYNQTGMALNQVAQIQAGLQYKPQVQRVPGKWTGANFNDVKHAMDTKRLAQDPALKYQFLRLDQPQNISIDKINQFLKGKGVLENQGAAFNKAAQMYGINEVYLISHALLETGNGTSQLAKGADVVNNKVVTNSNTKYHNVFGIAAYDNDPLREGIKYAKQAGWDTVSKAIVGGAKFIGNSYVKAGQNTLYKMRWNPAHPGTHQYATDVDWANINAKIIKGYYDKIGEVGKYFDIPQYK

SEQ ID NO: 84 - protein, 337 aa, Staphylococcus aureus
  MOD_RES (254)..(327): X = anything
MKGKFLKVSSLFVATLTTATLVSSPAANALSSKAMDNHPQQTQSSKQQTPKIQKGGNLKPLEQREHANVILPNNDRHQITDTTNGHYAPVTYIQVEAPTGTFIASGVVVGKDTLLTNKHVVDATHGDPHALKAFPSAINQDNYPNGGFTAEQITKYSDEGDLAIVKFSPNEQHKHIGEVVKPATMSNNADTQVNQNITVTGYPGDKPVATMWESKGKITYLKGEAMQYDLSTTGGNSGSPVFNEKNEVIGIHWXGVPNEFNGAVFINENVRNFLKQNIEDIHFATMTNLITQIILITLTILITLTTQMNQITLTTLTTLIIQTMAIXIIQTIQMQLN

SEQ ID NO: 85 - protein, 334 aa, Staphylococcus aureus
MQKKVIAAIIGTSAISAVAATQANAATTHTVKPGESVWAISNKYGISIAKLKSLNNLTSNLIFPNQVLKVSGSSNSTSNSSRPSTNSGGGSYYTVQAGDSLSLIASKYGTTYQNIMRLNGLNNFFIYPGQKLKVSGTASSSNAASNSSRPSTNSGGGSYYTVQAGDSLSLIASKYGTTYQKIMSLNGLNNFFIYPGQKLKVTGNASTNSGSATTTNRGYNTPVFSHQNLYTWGQCTYHVFNRRAEIGKGISTYWWNANNWDNAAAADGYTIDNRPTVGSIAQTDVGYYGHVMFVERVNNDGSILVSEMNYSAAPGILTYRTVPAYQVNNYRYIH

SEQ ID NO: 86 - protein, 947 aa, Staphylococcus aureus
MNNKKTATNRKGMIPNRLNKFSIRKYSVGTASILVGTTLIFGLSGHEAKAAEHTNGELNQSKNETTAPSENKTTKKVDSRQLKDNTQTATADQPKVTMSDSATVKETSSNMQSPQNATANQSTTKTSNVTTNDKSSTTYSNETDKSNLTQAKDVSTTPKTTTIKPRTLNRMAVNTVAAPQQGTNVNDKVHFSNIDIAIDKGHVNQTTGKTEFWATSSDVLKLKANYTIDDSVKEGDTFTFKYGQYFRPGSVRLPSQTQNLYNAQGNIIAKGIYDSTTNTTTYTFTNYVDQYTNVRGSFEQVAFAKRKNATTDKTAYKMEVTLGNDTYSEEIIVDYGNKKAQPLISSTNYINNEDLSRNMTAYVNQPKNTYTKQTFVTNLTGYKFNPNAKNFKIYEVTDQNQFVDSFTPDTSKLKDVTDQFDVIYSNDNKTATVDLMKGQTSSNKQYIIQQVAYPDNSSTDNGKIDYTLDTDKTKYSWSNSYSNVNGSSTANGDQKKYNLGDYVWEDTNKDGKQDANEKGIKGVYVILKDSNGKELDRTTTDENGKYQFTGLSNGTYSVEFSTPAGYTPTTANVGTDDAVDSDGLTTTGVIKDADNMTLDSGFYKTPKYSLGDYVWYDSNKDGKQDSTEKGIKGVKVTLQNEKGEVIGTTETDENGKYRFDNLDSGKYKVIFEKPAGLTQTGTNTTEDDKDADGGEVDVTITDHDDFTLDNGYYEEETSDSDSDSDSDSDSDSDSDSDSDSDSDSDSDSDSDSDSDSDSDSDSDSDSDSDSDSDSDSDSDSDSDSDSDSDSDSDSDSDSDSDSDSDSDSDSDSDSDSDSDSDSDSDSDSDSDSDSDSDSDSDSDSDSDSDSDSDSDSDSDSDSDSDSDSDSDSDSDNDSDSDSDSDSDAGKHTPAKPMSTVKDQHKTAKALPETGSENNNSNNGTLFGGLFAALGSLLLFGRRKKQNK

SEQ ID NO: 87 - protein, 254 aa, Staphylococcus aureus
MDINSEEYKQEVLIKDVVMLAARILLESGAEGTRVEDTMTRIAKKLGYSESNSFVTNTVIQFTLHSESFPRIFRITSRDTNLIKISQANKISRQITNNEISLAEAKTQLEKIYVAKRDSSLPFKGFAAAMIAMSFLYLQGGRLIDVLTAILAGSLGYLVTEILDRKLHAQFIPEFIGSLVIGIIAVIGHTLIPTGDLATIIIAAVMPIVPGVLITNAIQDLFGGHMLMFTTKSLEALVTAFGIGAGVGSVLILV

SEQ ID NO: 88 - protein, 332 aa, Staphylococcus aureus
VIAIMNVIIDERKENAMTFNKVLLSWIVILIITTSIYLFWQLGDINDVFNQSILINVRLPRLLEALLTGMILTVAGLIFQTVLNNALADSFTLGLASGATFGSGLALFLGLTTLWIPVFSITFSLITLITVLVITSVLSQGYPVRILILSGLMIGALFNSLLYFLILLKPRKLNTIANYLFGGFGDAEYSNVSIIAITFIIALFGIFIILNQLKLLQLGELKSQSLGLNVQLITYIALCIASMITAINVAYVGIIGFIGMVIPQLIRKWQWKQSLGRQLALNIVTGGQIMVMADFIGSHILSPVQIPASIIIALIGIPVLFYMLISQSKRLH

SEQ ID NO: 89 - protein, 265 aa, Staphylococcus aureus
MKKLAFAITATSGAAAFLTHHDAQASTQHTVQSGESLWSIAQKYNTSVESIKQNNQLDNNLVFPGQVISVGGSDAQNTSNTSPQAGSASSHTVQAGESLNIIASRYGVSVDQLMAANNLRGYLIMPNQTLQIPNGGSGGTTPTATTGSNGNASSFNHQNLYTAGQCTWYVFDRRAQAGSPISTYWSDAKYWAGNAANDGYQVNNTPSVGSIMQSTPGPYGHVAYVERVNGDGSILISEMNYTYGPYNMNYRTIPASEVSSYAFIH

SEQ ID NO: 90 - protein, 253 aa, Staphylococcus aureus
MPDSITIIDENKVIDVVLIAGRILLESGAETYRVEDTMNRIAHSYGLHNTYSFVSSTAIIFSLNDRTSTRLIRVQERTTDLEKIALTNSLSRKISNKELTIDEAKSEFIHLQHASLQYSFLTNFFAAAIACGFFLFMFGGVASDCWIAVIAGGSAFLTFSFVQRYIQIKFFSEFVAAAVVISIAATFTKLGIATNQDIITIASVMPLVPGILITNAIRDLLAGELLAGMSRGVEAALTAFAIGAGVAIVLLII

SEQ ID NO: 91 - protein, 843 aa, Staphylococcus aureus
MGFLSKILDGNNKEIKQLGKLADKVIALEEKTAILTDEEIRNKTKQFQTELADIDNVKKQNDYLDKILPEAYALVREGSKRVFNMTPYKVQIMGGIAIHKGDIAEMRTGEGKTLTATMPTYLNALAGRGVHVITVNEYLSSVQSEEMAELYNFLGLTVGLNLNSKTTEEKREAYAQDITYSTNNELGFDYLRDNMVNYSEDRVMRPLHFAIIDEVDSILIDEARTPLIISGEAEKSTSLYTQANVFAKMLKQDEDYKYDEKTKAVHLTEQGADKAERMFKVENLYDVQNVDVISHINTALRAHVTLQRDVDYMVVDGEVLIVDQFTGRTMPGRRFSEGLHQAIEAKEGVQIQNESKTMASITFQNYFRMYNKLAGMTGTAKTEEEEFRNIYNMTVTQIPTNKPVQRNDKSDLIYISQKGKFDAVVEDVVEKHKAGQPVLLGTVAVETSEYISNLLKKRGIRHDVLNAKNHEREAEIVAGAGQKGAVTIATNMAGRGTDIKLGEGVEELGGLAVIGTERHESRRIDDQLRGRSGRQGDKGDSRFYLSLQDELMIRFGSERLQKMMSRLGLDDSTPIESKMVSRAVESAQKRVEGNNFDARKRILEYDEVLRKQREIIYNERNSIIDEEDSSQVVDAMLRSTLQRSINYYINTADDEPEYQPFIDYINDIFLQEGDITEDDIKGKDAEDIFEVVWAKIEAAYQSQKDILEEQMNEFERMILLRSIDSHWTDHIDTMDQLRQGIHLRSYAQQNPLRDYQNEGHELFDIMMQNIEEDTCKFILKSVVQVEDNIEREKTTEFGEAKHVSAEDGKEKVKPKPIVKGDQVGRNDDCPCGSGKKFKNCHGK

SEQ ID NO: 92 - protein, 213 aa, Staphylococcus aureus
MRESMSNQNYDYNKNEDGSKKKMSTTAKVVSIATVLLLLGGLVFAIFAYVDHSNKAKERMLNEQKQEQKEKRQKENAEKERKKKQQEEKEQNELDSQANQYQQLPQQNQYQYVPPQQQAPTKQRPAKEENDDKASKDESKDKDDKASQDKSDDNQKKTDDNKQPAQPKPQPQQPTPKPNNNQQNNQSNQQAKPQAPQQNSQSTTNKQNNANDK

SEQ ID NO: 93 - protein, 933 aa, Staphylococcus aureus
MNMKKKEKHAIRKKSIGVASVLVGTLIGFGLLSSKEADASENSVTQSDSASNESKSNDSSSVSAAPKTDDTNVSDTKTSSNTNNGETSVAQNPAQQETTQSSSTNATTEETPVTGEATTTTTNQANTPATTQSSNTNAEELVNQTSNETTSNDTNTVSSVNSPQNSTNAENVSTTQDTSTEATPSNNESAPQSTDASNKDVVNQAVNTSAPRMRAFSLAAVAADAPAAGTDITNQLTNVTVGIDSGTTVYPHQAGYVKLNYGFSVPNSAVKGDTFKITVPKELNLNGVTSTAKVPPIMAGDQVLANGVIDSDGNVIYTFTDYVNTKDDVKATLTMPAYIDPENVKKTGNVTLATGIGSTTANKTVLVDYEKYGKFYNLSIKGTIDQIDKTNNTYRQTIYVNPSGDNVIAPVLTGNLKPNTDSNALIDQQNTSIKVYKVDNAADLSESYFVNPENFEDVTNSVNITFPNPNQYKVEFNTPDDQITTPYIVVVNGHIDPNSKGDLALRSTLYGYNSNIIWRSMSWDNEVAFNNGSGSGDGIDKPVVPEQPDEPGEIEPIPEDSDSDPGSDSGSDSNSDSGSDSGSDSTSDSGSDSASDSDSASDSDSASDSDSASDSDSASDSDSDNDSDSDSDSDSDSDSDSDSDSDSDSDSDSDSDSDSDSDSDSDSDSDSDSDSDSDSDSDSDSDSDSDSDSDSDSDSDSDSDSDSDSDSDSDSDSDSDSDSDSDSDSDSDSDSDSDSDSDSDSDSDSDSDSDSDSDSDSDSDSDSASDSDSDSDSDSDSDSDSDSDSDSDSDSDSDSDSDSDSDSESDSDSESDSDSDSDSDSDSDSDSDSDSDSASDSDSGSDSDSSSDSDSESDSNSDSESGSNNNVVPPNSPKNGTNASNKNEAKDSKEPLPDTGSEDEANTSLIWGLLASIGSLLLFRRKKENKDKK

SEQ ID NO: 94 - protein, 322 aa, Staphylococcus aureus
MNSNHAKASVTESVDKKFVVPESGINKIIPAYDEFKNSPKVNVSNLTDNKNFVASEDKLNKIADSSAASKIVDKNFVVPESKLGNIVPEYKEINNRVNVATNNPASQQVDKHFVAKGPEVNRFITQNKVNHHFITTQTHYKKVITSYKSTHVHKHVNHAKDSINKHFIVKPSESPRYTHPSQSLIIKHHFAVPGYHAHKFVTPGHASIKINHFCVVPQINSFKVIPPYGHNSHRMHVPSFQNNTTATHQNAKVNKAYDYKYFYSYKVVKGVKKYFSFSQSNGYKIGKPSLNIKNVNYQYAVPSYSPTHYVPEFKGSLPAPRV

SEQ ID NO: 95 - protein, 357 aa, Staphylococcus aureus
LEHTIMKMRTIAKTSLALGLLTTGAITVTTQSVKAEKIQSTKVDKVPTLKAERLAMINITAGANSATTQAANTRQERTPKLEKAPNTNEEKTSASKIEKISQPKQEEQKTLNISATPAPKQEQSQTTTESTTPKTKVTTPPSTNTPQPMQSTKSDTPQSPTIKQAQTDMTPKYEDLRAYYTKPSFEFEKQFGFMLKPWTTVRFMNVIPNRFIYKIALVGKDEKKYKDGPYDNIDVFIVLEDNKYQLKKYSVGGITKTNSKKVNHKVELSITKKDNQGMISRDVSEYMITKEEISLKELDFKLRKQLIEKHNLYGNMGSGTIVIKMKNGGKYTFELHKKLQEHRMAGTNIDNIEVNIK

SEQ ID NO: 96 - protein, 742 aa, Staphylococcus aureus
MTTIKTSNLGFPRLGRKREWKKAIESYWAKKISKEELDQTLTDLHKENLLLQKYYHLDSIPVGDFSLYDHILDTSLLFNIIPERFQGRTIDDDLLFDIARGNKDHVASALIKWFNTNYHYIVPEWDNVEPKVSRNVLLDRFKYAQSLNVNAHPVIVGPITFVKLSKGGHQTFEEKVKTLLPLYKEVFESLIDAGAEYIQVDEPILVTDDSESYENITREAYDYFEKAGVAKKLVIQTYFERAHLKFLSSLPVGGIGLDFVHDNGYNLKQIEAGDFDKSKTLYAGIIDGRNVWASDIEAKKVLIDKLLAHTNELVIQPSSSLLHVPVSLDDETLDTSVGEGLSFATEKLDELDALRRLFNQNDSVKYDKLKARYERFQNQSFKNLDYDFESVRTSRQSPFAQRIEQQQKRLNLPDLPTTTIGSFPQSREVRKYRADWKNKRITDEAYETFLKNEIARWIKIQEDIGLDVLVHGEFERNDMVEFFGEKLQGFLVTKFGWVQSYGSRAVKPPIIYGDVKWTAPLTVDETVYAQSLTDKPVKGMLTGPVTILNWSFERVDLPRKVVQDQIALAINEEVLALEAAGIKVIQVDEPALREGLPLRSEYHEQYLKDAVLSFKLATSSVRDETQIHTHMCYSQFGQIIHAIHDLDADVISIETSRSHGDLIKDFEDINYDLGIGLGVYDIHSPRIPTKEEITTAINRSLQQIDRSLFWVNPDCGLKTRKEEEVKDALTVLVNAVKAKRQE

SEQ ID NO: 97 - protein, 53 aa, Staphylococcus aureus
MSDTYKSYLVAVLCFTVLAIVLMPFLYFTTAWSIAGFASIATFIFYKEYFYEE

SEQ ID NO: 98 - protein, 644 aa, Staphylococcus aureus
MLRGQEERKYSIRKYSIGVVSVLAATMFVVSSHEAQASEKTSTNAAAQKETLNQPGEQGNAITSHQMQSGKQLDDMHKENGKSGTVTEGKDTLQSSKHQSTQNSKTIRTQNDNQVKQDSERQGSKQSHQNNATNNTERQNDQVQNTHHAERNGSQSTTSQSNDVDKSQPSIPAQKVIPNHDKAAPTSTTPPSNDKTAPKSTKAQDATTDKHPNQQDTHQPAHQIIDAKQDDTVRQSEQKPQVGDLSKHIDGQNSPEKPTDKNTDNKQLIKDALQAPKTRSTTNAAADAKKVRPLKANQVQPLNKYPVVFVHGFLGLVGDNAPALYPNYWGGNKFKVIEELRKQGYNVHQASVSAFGSNYDRAVELYYYIKGGRVDYGAAHAAKYGHERYGKTYKGIMPNWEPGKKVHLVGHSMGGQTIRLMEEFLRNGNKEEIAYHKAHGGEISPLFTGGHNNMVASITTLATPHNGSQAADKFGNTEAVRKIMFALNRFMGNKYSNIDLGLTQWGFKQLPNESYIDYIKRVSKSKIWTSDDNAAYDLTLDGSAKLNNMTSMNPNITYTTYTGVSSHTGPLGYENPDLGTFFLMATTSRIIGHDAREEWRKNDGVVPVISSLHPSNQPFVNVTNDEPATRRGIWQVKPIIQGWD

SEQ ID NO: 99 - protein, 461 aa, Staphylococcus aureus
MIHLIKGKMHHTVLCIHLNKGVALMNQYHSNAQQPSAWRFFVYSLVGILCFFIPFTINGNNTIFVDHVHLAIRSIIGPLMPYVALIMILIGTALPIVRRTFMTSITNLVITLFKVAGAMIGIMYVFKIGPSILFKANYGPFLFEKLMMPLSILIPVGAIALSLLVGYGLLEFVGVYMEPIMRPIFKTPGKSAVDAVASFVGSYSLGLLITNRVYKQGMYNKREATIIATGFSTVSATFMIIVAKTLGLMPHWNLYFWITLVITFVVTAITAWLPPISNESTEYYNGQEGEQEVAIEGSRLKTAYAEAMKQNALTPSLVKNVWDNLKDGLEMTVGILPSILSIGFLGLIVANYTPFIDWLGYIFYPFIYIFPIADQALLAKASAISIVEMFLPSLLVTKAAMSTKFVVGVVSVSAIIFFSALVPCILATEIKIPVWKLIIIWFLRVALSLLITIPVALLIFG

SEQ ID NO: 100 - protein, 300 aa, Staphylococcus aureus
MVIMKKTILLTMTTLTLFSMSPNSAQAYTNDSKTLEEAKKAHPNAQFKVNKDTGAYTYTYDKNNTPNNNHQNQSRTNDNHQHANQRDLNNNQYHSSLSGQYTHINDAIDSHTPPQTSPSNPLTPAIPNVEDNDDELNNAFSKDNKGLITGIDLDELYDELQIAEFNDKAKTADGKPLALGNGKIIDQPLITSKNNLYTAGQCTWYVFDKRAKDGHTISTFWGDAKNWAGQASSNGFKVDRHPTRGSILQTVNGPFGHVAYVEKVNIDGSILISEMNWIGEYIVSSRTISASEVSSYNYIH

SEQ ID NO: 101 - protein, 311 aa, Staphylococcus aureus
MEVSSMKPYIQLVVFKQWLQYILLVTTIVIALVLIGIGYRVAHDNFKIPITIQDLDQTTASKSFVNKIKQSDYVTIKKVDEDESYIEDDVTKKEAILSMQIPKGFSQKLKENRLKETIQLYGRDDFIGGIAVEIVSSSLYEQQIPNIIYEHLEDMKQHQSIDAINKSYHKHTPESKIKFVSLTKQAQHSISISLIFAVILFVSAVQVVLHYRLNQQAALQRLSQYHLSRFKLYSTYVMTHTILLLLVLLAVSLYLSQPLSLIFYLKSLLLILIYEIGIVFILFHIQTISHRLFMTFIYALAMGIVYLIIFM

SEQ ID NO: 102 - protein, 465 aa, Staphylococcus aureus
MIEVTEMNFFDIHKIPNKGIPLSVQRKLWLRNFMQAFFVVFFVYMAMYLIRNNFKAAQPFLKEEIGLSTLELGYIGLAFSITYGLGKTLLGYFVDGRNTKRIISFLLILSAITVLIMGFVLSYFGSVMGLLIVLWGLNGVFQSVGGPASYSTISRWAPRTKRGRYLGFWNTSHNIGGAIAGGVALWGANVFFHGNVIGMFIFPSVIALLIGIATLFIGKDDPEELGWNRAEEIWEEPVDKENIDSQGMTKWEIFKKYILGNPVIWILCVSNVFVYIVRIGIDNWAPLYVSEHLHFSKGDAVNTIFYFEIGALVASLLWGYVSDLLKGRRAIVAIGCMFMITFVVLFYTNATSVMMVNISLFALGALIFGPQLLIGVSLTGFVPKNAISVANGMTGSFAYLFGDSMAKVGLAAIADPTRNGLNIFGYTLSGWTDVFIVFYVALFLGMILLGIVAFYEEKKIRSLKI

SEQ ID NO: 103 - protein, 279 aa, Staphylococcus aureus
MTKKKNILKAIGIYSFIAMMFVIILYPLLWTFGISLNPGTNLYGAKMIPDNATFKNYAFLLFDDSSQYLTWYKNTLIVASANALFSVIFVTLTAYAFSRYRFVGRKYGLITFLILQMFPVLMAMVAIYILLNTIGLLDSLFGLTLVYIGGSIPMNAFLVKGYFDTIPKELDESAKIDGAGHMRIFLQIMLPLAKPILAVVALFNFMGPFMDFILPKILLRSPEKFTLAVGLFNFINDKYANNFTVFAAGAIMIAVPIAIVFLFLQRYLVSGLTTGATKG

SEQ ID NO: 104 - protein, 299 aa, Staphylococcus aureus
MMENSTTEARNEATMHLDEMTVEEALITMNKEDQQVPLAVRKAIPQLTKVIKKTIAQYKKGGRLIYIGAGTSGRLGVLDAAECVPTFNTDPHEIIGIIAGGQHAMTMAVEGAEDHKKLAEEDLKNIDLTSKDVVIGIAASGKTPYVIGGLTFANTIGATTVSISCNEHAVISEIAQYPVEVKVGPEVLTGSTRLKSGTAQKLILNMISTITMVGVGKVYDNLMIDVKATNQKLIDRSVRIIQEICAITYDEAMALYQVSEHDVKVATVMGMCGISKEEATRRLLNNGDIVKRAIRDRQP

SEQ ID NO: 105 - protein, 528 aa, Staphylococcus aureus
LQYIIRYIMMTLQIHTGGINLKKKNIYSIRKLGVGIASVTLGTLLISGGVTPAANAAQHDEAQQNAFYQVLNMPNLNADQRNGFIQSLKDDPSQSANVLGEAQKLNDSQAPKADAQQNNFNKDQQSAFYEILNMPNLNEAQRNGFIQSLKDDPSQSTNVLGEAKKLNESQAPKADNNFNKEQQNAFYEILNMPNLNEEQRNGFIQSLKDDPSQSANLLSEAKKLNESQAPKADNKFNKEQQNAFYEILHLPNLNEEQRNGFIQSLKDDPSQSANLLAEAKKLNDAQAPKADNKFNKEQQNAFYEILHLPNLTEEQRNGFIQSLKDDPSVSKEILAEAKKLNDAQAPKEEDNNKPGKEDNNKPGKEDNNKPGKEDNNKPGKEDGNKPGKEDNKKPGKEDGNKPGKEDNKKPGKEDGNKPGKEDGNKPGKEDGNGVHVVKPGDTVNDIAKANGTTADKIAADNKLADKNMIKPGQELVVDKKQPANHADANKAQALPETGEENPFIGTTVFGGLSLALGAALLAGRRREL

SEQ ID NO: 106 - protein, 385 aa, Staphylococcus aureus
MDKKSEKRGIKMTVQSAYIHIPFCVRICTYCDFNKYFIQNQPVDEYLDALITEMSTAKYRILKTMYVGGGTPTALSINQLERLLKAIRDTFTITGEYTFEANPDELTKEKVQLLEKYGVKRISMGVQTFKPELLSVLGRTHNTEDIYTSVLNAKNAGIKSISLDLMYHLPKQTIEDFEQSLDLALDMDIQHISSYGLILEPKTQFYNMYRKGLLKLPNEDLGADMYQLLMSKIEQSPFHQYEISNFALDGHESEHNKVYWFNEEYYGFGAGASGYVDGVRYTNINPVNHYIKAINKESKAILVSNKPSLTERMEEEMFLGLRLNEGVSSSRFKKKFDQSIESVFGQTINNLKEKELIVEKNDVIALTNRGKVIGNEVFEAFLIND

SEQ ID NO: 107 - DNA, 1245 bp, Staphylococcus aureus
atgaatgtattagtaattggtgctggtggacgagaacatgcacttgcatataaacttaatcaatcgaatctagttaaacaagtgtttgtcattccaggtaatgaggcaatgacacctatagctgaagtacacactgaaatttcagaacctgatcatcaagcgatactagattttgctaaacggcaaaatgttgattgggtagttataggtccagaacagccgctaattgatggattagcagacattttacgagcgaatggtttcaaagtgtttggtccaaataagcaagcagctcaaatcgaaggctcaaaattatttgctaaaaagataatggaaaaatataatattccaactgctgattataaagaagttgagcgaaaaaaggatgctttaacatatattgaaaactgtgaattgcccgttgttgtcaagaaagatgggttagctgctgggaaaggcgttattattgcagatactattgaagcagccagaagtgctattgagattatgtatggtgatgaagaagaaggtactgttgtatttgaaacgtttttagaaggtgaagagttctcgctaatgacatttgttaatggtgatttagcagtacctttcgactgtattgcacaagatcataaacgcgcatttgatcatgatgaaggaccaaatactggtggtatgggggcttattgtccagtaccacatattagtgacgatgttttaaaacttacaaatgaaacaattgcacaacccattgcaaaggcaatgcttaatgaaggttatcaattcttcggtgtattatacattggtgctattttaactaaagatggtccaaaagtaatagaatttaatgcccgttttggtgatcctgaagctcaagtattattaagtcgcatggaaagtgatttaatgcagcatattattgatttagatgaaggaaaacgtactgaattcaaatggaaaaatgaatctattgtaggggtcatgttggcatcaaaaggatatcctgatgcatatgaaaaagggcataaagtaagtggctttgatttaaatgaaaactattttgttagtggattaaagaagcaaggtgatacctttgttacttcaggtggtagagttatacttgccatcggaaaaggtgacaatgtacaagatgcacagcgagacgcatacaaaaaagtatcacaaatacaaagtgaccatttattctatcgtcatgacattgcgaataaagcactacaacttaaa

SEQ ID NO: 108 - protein, 415 aa, Staphylococcus aureus
MNVLVIGAGGREHALAYKLNQSNLVKQVFVIPGNEAMTPIAEVHTEISEPDHQAILDFAKRQNVDWVVIGPEQPLIDGLADILRANGFKVFGPNKQAAQIEGSKLFAKKIMEKYNIPTADYKEVERKKDALTYIENCELPVVVKKDGLAAGKGVIIADTIEAARSAIEIMYGDEEEGTVVFETFLEGEEFSLMTFVNGDLAVPFDCIAQDHKRAFDHDEGPNTGGMGAYCPVPHISDDVLKLTNETIAQPIAKAMLNEGYQFFGVLYIGAILTKDGPKVIEFNARFGDPEAQVLLSRMESDLMQHIIDLDEGKRTEFKWKNESIVGVMLASKGYPDAYEKGHKVSGFDLNENYFVSGLKKQGDTFVTSGGRVILAIGKGDNVQDAQRDAYKKVSQIQSDHLFYRHDIANKALQLK

SEQ ID NO: 109 - DNA, 822 bp, Staphylococcus aureus
atgcaaccacatttaatatgtctagacttagacggaacattattaaacgataacaaagaaatttcatcatatactaaacaagtattaaatgaattacaacaacgtggacaccaaattatgattgcgactggcagaccttatcgtgcaagtcaaatgtattatcatgaattaaatttaacgacaccaattgttaattttaatggcgcttacgtacatcaccctaaagataaaaacttcaaaacttgccatgaaattttagatttaggcatcgcacaaaacattattcaaggattacaacaatatcaagtatcgaatattatagcagaagtgaaagattatgttttcattaacaatcatgatccaagattatttgaaggtttttcaatgggtaatccaagaattcaaactggtaatttacttgtccacttgaaagaatcccctacctcaattttaattgaagccgaagaaagtaaaatacctgaaatcaaaaatatgcttactcatttttatgccgatcatattgagcatcgacgctggggcgcaccattccctgtcattgaaattgtaaaacttggtattaataaagcaagaggcattgagcaagttagacaatttttaaatattgaccgaaataatattattgcattcggtgatgaagataatgatattgaaatgattgagtacgcgcgtcacggtgttgctatggaaaatggtttgcaagaacttaaagatgtagcgaacaatattacattcaacaataatgaagatggcattggtcgatatttgaatgatttctttaatttaaatattagatattactgt

SEQ ID NO: 110 - protein, 274 aa, Staphylococcus aureus
MQPHLICLDLDGTLLNDNKEISSYTKQVLNELQQRGHQIMIATGRPYRASQMYYHELNLTTPIVNFNGAYVHHPKDKNFKTCHEILDLGIAQNIIQGLQQYQVSNIIAEVKDYVFINNHDPRLFEGFSMGNPRIQTGNLLVHLKESPTSILIEAEESKIPEIKNMLTHFYADHIEHRRWGAPFPVIEIVKLGINKARGIEQVRQFLNIDRNNIIAFGDEDNDIEMIEYARHGVAMENGLQELKDVANNITFNNNEDGIGRYLNDFFNLNIRYYC

SEQ ID NO: 111 - DNA, 1503 bp, Staphylococcus aureus
gtgaaaccaatggctaagtctaatagtaaagacatcgttttaattggagccggtgtacttagcacaacatttggttcaatgttaaaagaaattgagccagactggaatatccacgtttacgaacgcttggatcgtcctgcaatcgaaagttcaaacgaaagaaataatgctggtacgggtcatgcagcattatgtgagttgaactacacagttttacaacctgatggttctatcgacatcgaaaaagcgaaagtgattaacgaagagtttgagatttcaaaacaattctggggtcacttagtgaaaagcggtagcatcgagaacccaagagaatttatcaatccattaccacacatcagttatgttagaggtaaaaacaatgttaaattcttaaaagatcgttacgaagcgatgaaagctttccctatgttcgataatatcgaatatactgaagacatcgaagtaatgaaaaaatggattccattgatgatgaaaggccgtgaagataaccctggtatcatggcggcaagtaaaattgacgaaggtacagatgtaaacttcggtgaattaacacgtaaaatggctaaaagcattgaagcacatccaaatgctacagtgcaatttaaccatgaagttgttgattttgaacaattatcaaatggtcaatgggaagttactgttaaaaatcgcctaactggtgagaaattcaaacaagtaactgactacgtattcatcggtgctggcggtggagcaattccattattacaaaaaacaggtatccctgaaagtaaacatttgggtggattccctatcagtggtcaattcttagcttgtacaaacccacaagttattgaacaacacgatgccaaagtttatggtaaagagccacctggtacaccaccaatgactgtacctcatttagatacgcgttacattgatggtcaaagaacattattatttggaccatttgctaatgttggacctaaattcttgaaaaatggttctaacttagatttattcaagtctgttaaaacatacaacattacaactttattagcagcagcagttaaaaacttacctttaattaaatactcatttgaccaagtaattatgacaaaagaaggttgtatgaaccacttacgtactttctatccagaagcacgtaatgaagattggcaattatacactgctggtaaacgtgtacaagttatcaaagatacacctgaacacggtaaaggattcatccaattcggtacagaagtggttaactcacaagaccacactgtaattgcattattaggtgaatcaccaggggcttcaacttcagtttcagttgcgttagaagtattagaacgtaacttccctgaatacaaaactgaatgggcacctaaaattaagaaaatgattccatcatacggtgaatcattaattgaagacgaaaaattaatgagaaaaatccgtaaacaaacttcaaaagacttagaattaggttactacgaaaac

SEQ ID NO: 112 - protein, 501 aa, Staphylococcus aureus
MKPMAKSNSKDIVLIGAGVLSTTFGSMLKEIEPDWNIHVYERLDRPAIESSNERNNAGTGHAALCELNYTVLQPDGSIDIEKAKVINEEFEISKQFWGHLVKSGSIENPREFINPLPHISYVRGKNNVKFLKDRYEAMKAFPMFDNIEYTEDIEVMKKWIPLMMKGREDNPGIMAASKIDEGTDVNFGELTRKMAKSIEAHPNATVQFNHEVVDFEQLSNGQWEVTVKNRLTGEKFKQVTDYVFIGAGGGAIPLLQKTGIPESKHLGGFPISGQFLACTNPQVIEQHDAKVYGKEPPGTPPMTVPHLDTRYIDGQRTLLFGPFANVGPKFLKNGSNLDLFKSVKTYNITTLLAAAVKNLPLIKYSFDQVIMTKEGCMNHLRTFYPEARNEDWQLYTAGKRVQVIKDTPEHGKGFIQFGTEVVNSQDHTVIALLGESPGASTSVSVALEVLERNFPEYKTEWAPKIKKMIPSYGESLIEDEKLMRKIRKQTSKDLELGYYEN

SEQ ID NO: 113 - DNA, 741 bp, Staphylococcus aureus
atgctagaggcacaattttttactgatactggacaacatagagataagaatgaagatgcgggtggtattttttataatcaaactaatcaacaacttttagttctgtgtgatggtatgggtggccataaagcaggagaagttgcaagtaaatttgttacagatgagttgaaatcccgttttgaagcggaaaatcttatagaacaacatcaagctgaaaattggttgcgtaataatataaaagatataaattttcagttatatcactatgcacaagaaaatgcagaatataaaggtatgggtacaacatgtgtttgtgcacttgtttttgaaaaatcagttgtgatagcaaatgtcggtgattctagagcctatgttattaatagtcgacaaattgaacaaattactagtgatcactcatttgttaatcatcttgttttaacgggtcaaattacgccggaagaagcatttacacatccacaacgtaatattattacgaaggtgatgggcacagataaacgtgtgagtccagatttgtttattaagcgattaaatttttatgattatttattattaaattcagatggattaactgattatgttaaagacaatgaaattaagcgtttgttagtaaaagaaggtacaatagaagatcatggtgatcaattaatgcaattggcattagataaccattcgaaagataacgttactttcatactcgcggctattgaaggtgataaagta

SEQ ID NO: 114 - protein, 160 aa, Staphylococcus aureus
MATDTGHRDKNDAGGYNTNVCDGMGGHKAGVASKVTDKSRANHANWRNNKDNYHYANAYKGMGTTCVCAVKSVVANVGDSRAYVNSRTSDHSVNHVTGTATHRNTKVMGTDKRVSDKRNYDYNSDGTDYVKDNKRVKGTDHGDMADNHSKDNVTAAGDKV

SEQ ID NO: 115 - DNA, 1182 bp, Staphylococcus aureus
atggcaaaagaaaaattcgatcgttctaaagaacatgccaatatcggtactatcggtcacgttgaccatggtaaaacaacattaacagcagcaatcgctactgtattagcaaaaaatggtgactcagttgcacaatcatatgacatgattgacaacgctccagaagaaaaagaacgtggtatcacaatcaatacttctcacattgagtaccaaactgacaaacgtcactacgctcacgttgactgcccaggacacgctgactacgttaaaaacatgatcactggtgctgctcaaatggacggcggtatcttagtagtatctgctgctgacggtccaatgccacaaactcgtgaacacattcttttatcacgtaacgttggtgtaccagcattagtagtattcttaaacaaagttgacatggttgacgatgaagaattattagaattagtagaaatggaagttcgtgacttattaagcgaatatgacttcccaggtgacgatgtacctgtaatcgctggttcagcattaaaagctttagaaggcgatgctcaatacgaagaaaaaatcttagaattaatggaagctgtagatacttacattccaactccagaacgtgattctgacaaaccattcatgatgccagttgaggacgtattctcaatcactggtcgtggtactgttgctacaggccgtgttgaacgtggtcaaatcaaagttggtgaagaagttgaaatcatcggtttacatgacacatctaaaacaactgttacaggtgttgaaatgttccgtaaattattagactacgctgaagctggtgacaacattggtgcattattacgtggtgttgctcgtgaagacgtacaacgtggtcaagtattagctgctcctggttcaattacaccacatactgaattcaaagcagaagtatacgtattatcaaaagacgaaggtggacgtcacactccattcttctcaaactatcgtccacaattctatttccgtactactgacgtaactggtgttgttcacttaccagaaggtactgaaatggtaatgcctggtgataacgttgaaatgacagtagaattaatcgctccaatcgcgattgaagacggtactcgtttctcaatccgtgaaggtggacgtactgtaggatcaggcgttgttactgaaatcattaaa

SEQ ID NO: 116 - protein, 394 aa, Staphylococcus aureus
MAKEKFDRSKEHANIGTIGHVDHGKTTLTAAIATVLAKNGDSVAQSYDMIDNAPEEKERGITINTSHIEYQTDKRHYAHVDCPGHADYVKNMITGAAQMDGGILVVSAADGPMPQTREHILLSRNVGVPALVVFLNKVDMVDDEELLELVEMEVRDLLSEYDFPGDDVPVIAGSALKALEGDAQYEEKILELMEAVDTYIPTPERDSDKPFMMPVEDVFSITGRGTVATGRVERGQIKVGEEVEIIGLHDTSKTTVTGVEMFRKLLDYAEAGDNIGALLRGVAREEIQRGQVLAAPGSITPHTEFKAEVYVLSKDEGGRHTPFFSNYRPQFYFRTTDVTGVVHLPEGTEMVMPGDNVEMTVELIAPIAIDEGTRFSIREGGRTVGSGVVTEITE

SEQ ID NO: 117 - DNA, 929 bp, Staphylococcus aureus
atgactaagagtgctttagtaacaggtgcatcaagaggaattggacgtagtattgcgttacaattagcagaagaaggatataatgtagcagtaaactatgcaggcagcaaagagaaagctgaagcagtagtcgaagaaatcaaagctaaaggtgttgaaagttttgcgattcaagcaaatgttgccgatgcatgaaaatgactaagagtgctttagtaacaggtgcatcaagaggaattggacgtagtattgcgttacaattagcagaagaaggatataatgtagcagtaaactatgcaggcagcaaagagaaagctgaagcagtagtcgaagaaatcaaagctaaaggtgttgaaagttttgcgattcaagcaaatgttgccgatgctgatgaagttaaagcaatgattaaagaagtagttagccaatttggttctttagatgttttagtaaataatgcaggtattactcgcgataatttattaatgcgtatgaaagaacaagagtgggatgatgttattgacacaaacttaaaaggtgtatttaactgtatccaaaaagcaacaccacaaatgttaagacaacgtagtggtgctatcatcaatttatcaagtgttgttggagcagtaggtaatccgggacaagcaaactatgttgcaacaaaagcaggtgttattggtttaactaaatctgcggcgcgtgaattagcatctcgtggtatcactgtaaatgcagttgcacctggttttattgtttctgatatgacagatgctttaagtgatgagcttaaagaacaaatgttgactcaaattccgttagcacgttttggtcaagacacagatattgctaatacagtagcgttcttagcatcagacaaagcaaaatatattacaggtcaaacaatccatgtaaatggtggaatgtacatg

SEQ ID NO: 118 - protein, 244 aa, Staphylococcus aureus
MTKSALVTGASRGIGRSIALQLAEEGYNVAVNYAGSKEKAEAVVEEIKAKGVESFAIQANVADADEVKAMIKEVVSQFGSLDVLVNNAGITRDNLLMRMKEQEWDDVIDTNLKGVFNCIQKATPQMLRQRSGAIINLSSVVGAVGNPGQANYVATKAGVIGLTKSAARELASRGITVNAVAPGFIVSDMTDALSDELKEQMLTQIPLARFGQDTDIANTVAFLASDKAKYITGQTIHVNGGMYM

SEQ ID NO: 119 - DNA, 420 bp, Staphylococcus aureus
atgaaaatttctactaaagggagatatggacttacattgatgatttctcttgctaaaaaagaggggcaaggatgtatatcattaaagtcaattgctgaagaaaataatttgagtgatttatatttagaacagcttgtaggtcctttaagaaatgcggggttaattcgaagtgtacgcggtgctaaaggtggataccaattaagagtgccagcggaagaaatctcagcaggggatattataagactgttagaaggtccaattacatttgttgaaagtattgaatcagaaccacctgcgcaaaaacaactatggattcgcatgagagatgcagtgagagatgttttagataatacaacattgaaatatttagcggaatatgtagatacaagtgaagatttagacggatacatgttttatatt

SEQ ID NO: 120 - protein, 111 aa, Staphylococcus aureus
MLKISTKGRYGLTIMIELAKKHGEGPTSLKSIAQTNNLSEHYLEQLVSPLRNAGLVKSIRGAYGGYVLGSEPDAITAGDIIRVLEGPISLLKCWKMRSLPSVSSGFASGML

SEQ ID NO: 121 - DNA, 1290 bp, Staphylococcus aureus
gtggcatttgaatttagattacccgatatcggggaaggtatccacgaaggtgaaattgtaaaatggtttgttaaagctggagatactattgaagaagacgatgttttagctgaggtacaaaacgataaatcagtagtagaaatcccatcaccagtatctggtactgtagaagaagttatggtagaagaaggtacagtagctgtagttggtgacgttattgttaaaatcgatgcacctgatgcagaagatatgcaatttaaaggtcatgatgatgattcatcatctaaagaagaacctgcgaaagaggaagcgccagcagagcaagcacctgtagctactcaaactgaagaagtagatgaaaacagaactgttaaagcaatgccttcagtacgtaaatacgcacgtgaaaaaggtgttaacattaaagcagtttctggatctggtaaaaatggtcgtattacaaaagaagatgtagatgcatacttaaatggtggtgcaccaacagcttcaaatgaatcagctgcttcagctacaagtgaagaagttgctgaaactcctgcagcacctgcagcagtaacattagaaggcgacttcccagaaacaactgaaaaaatccctgctatgcgtagagcaattgcgaaagcaatggttaactctaagcatactgcacctcatgtaacattaatggatgaaattgatgttcaagcattatgggatcaccgtaagaaatttaaagaaatcgcagctgaacaaggtactaagttaacattcttaccttatgttgttaaagcacttgtttctgcattgaaaaaatacccagcacttaacacttcattcaatgaagaagctggtgaaatcgttcataaacattactggaatatcggtattgcagcagacactgatagaggattattagtacctgttgttaaacatgctgatcgtaagtctattttccaaatttcagatgaaattaatgaattagctgttaaagcacgtgatggtaaattaacagccgatgaaatgaaaggtgctacatgcacaatcagtaatatcggttcagctggtggacaatggttcactccagttatcaatcacccagaagtagcaatcttaggaattggccgtattgctcaaaaacctatcgttaaagatggagaaattgttgcagcaccagtattagcattatcattaagctttgaccacagacaaattgatggtgcaactggccaaaatgcaatgaatcacattaaacgtttattaaataatccagaattattattaatggagggg

SEQ ID NO: 122 - protein, 420 aa, Staphylococcus aureus
MAFEFRLPDIGEGIHEGEIVKWFVKAGDTIEEDDVLAEVQNDKSVVEIPSPVSGTVEEVMVEEGTVAVVGDVIVKIDAPDAEDMQFKGHDDDSSSKEEPAKEEAPAEQAPVATQTEEVDENRTVKAMPSVRKYAREKGVNIKAVSGSGKNGRITKEDVDAYLNGGAPTASNESAASATSEEVAETPAAPAAVTLEGDFPETTEKIPAMRRAIAKAMVNSKHTAPHVTLMDEIDVQALWDHRKKFKEIAAEQGTKLTFLPYVVKALVSALKKYPALNTSFNEEAGEIVHKHYWNIGIAADTDRGLLVPVVKHADRKSIFQISDEINELAVKARDGKLTADEMKGATCTISNIGSAGGQWFTPVINHPEVAILGIGRIAQKPIVKDGEIVAAPVLALSLSFDHRQIDGATGQNAMNHIKRLL

SEQ ID NO: 123 - DNA, 4143 bp, Staphylococcus aureus
atgctaaacagagaaaataaaacggcaataacaaggaaaggcatggtatccaatcgattaaataaattttcgattagaaagtacacagtgggaacagcatcaattttagtaggtacaacattaatttttggtctggggaaccaagaagcaaaggctgcagaaagtactaataaagaattgaacgaagcgacaacttcagcaagtgataatcaatcgagtgataaagttgatatgcagcaactaaatcaagaagacaatactaaaaatgataatcaaaaagaaatggtatcatctcaaggtaatgaaacgacttcaaatgggaataaattaatagaaaaagaaagtgtacaatctaccactggaaataaagttgaagtttcaactgccaaatcagatgagcaagcttcaccaaaatctacgaatgaagatttaaacactaaacaaactataagtaatcaagaagcgttacaacctgatttgcaagagaataaatcagtggtaaatgttcaaccaactaatgaggaaaacaaaaaggtagatgccaaaactgaatcaactacattaaatgttaaaagtgatgctatcaagagtaatgatgaaactcttgttgataacaatagtaattcaaataatgaaaataatgcagatatcattttgccaaaaagtacagcacctaaacgtttgaatacaagaatgcgtatagcagcagtacagccatcatcaacagaggctaaaaatgttaatgatttaatcacatcaaatacaacattaactgtcgttgatgcagataaaaacaataaaatcgtaccagcccaagattatttatcattaaaatcacaaattacagttgatgacaaagttaaatcaggtgattatttcacaattaaatactcagatacagtacaagtatatggattgaatccggaagatattaaaaatattggtgatattaaagatccaaataatggtgaaacaattgcgactgcaaaacatgatactgcaaataatttaattacatatacatttacagattatgttgatcgatttaattctgtacaaatgggaattaattattcaatttatatggatgctgatacaattcctgttagtaaaaacgatgttgagtttaatgttacgataggtaatactacaacaaaaacaactgctaacattcaatatccagattatgttgtaaatgagaaaaattcaattggatcagcgttcactgaaacagtttcacatgttggaaataaagaaaatccagggtactataaacaaacgatttatgtaaatccatcggaaaattctttaacaaatgccaaactaaaagttcaagcttaccactcaagttatcctaataatatcgggcaaataaataaagatgtaacagatataaaaatatatcaagttcctaaaggttatacattaaataaaggatacgatgtgaatactaaagagcttacagatgtaacaaatcaatacttgcagaaaattacatatggcgacaacaatagcgctgttattgattttggaaatgcagattctgcttatgttgtaatggttaatacaaaattccaatatacaaatagcgaaagcccaacacttgttcaaatggctactttatcttcaacaggtaataaatccgtttctactggcaatgctttaggatttactaataaccaaagtggcggagctggtcaagaagtatataaaattggtaactacgtatgggaagatactaataaaaacggtgttcaagaattaggagaaaaaggcgttggcaatgtaactgtaactgtatttgataataatacaaatacaaaagtaggagaagcagttactaaagaagatgggtcatacttgattccaaacttacctaatggagattaccgtgtagaattttcaaacttaccaaaaggttatgaagtaaccccttcaaaacaaggtaataacgaagaattagattcaaacggcttatcttcagttattacagttaatggcaaagataacttatctgcagacttaggtatttacaaacctaaatacaacttaggtgactatgtctgggaagatacaaataaaaatggtatccaagaccaagatgaaaaaggtatatctggcgtaacggtaacattaaaagatgaaaacggtaacgtgttaaaaacagttacaacagacgctgatggcaaatataaatttactgatttagataatggtaattataaagttgaatttactacaccagaaggctatacaccgactacagtaacatctggtagcgacattgaaaaagactctaatggtttaacaacaacaggtgttattaatggtgctgataacatgacattagatagtggattctacaaaacaccaaaatataatttaggtaattatgtatgggaagatacaaataaagatggtaagcaggattcaactgaaaaaggtatttcaggcgtaacagttacattgaaaaatgaaaacggtgaagttttacaaacaactaaaacagataaagatggtaaatatcaatttactggattagaaaatggaacttataaagttgaattcgaaacaccatcaggttacacaccaacacaagtaggttcaggaactgatgaaggtatagattcaaatggtacatcaacaacaggtgtcattaaagataaagataacgatactattgactctggtttctacaaaccgacttacaacttaggtgactatgtatgggaagatacaaataaaaacggtgttcaagataaagatgaaaagggcatttcaggtgtaacagttacgttaaaagatgaaaacgacaaagttttaaaaacagttacaacagatgaaaatggtaaatatcaattcactgatttaaacaatggaacttataaagttgaattcgagacaccatcaggttatacaccaacttcagtaacttctggaaatgatactgaaaaagattctaatggtttaacaacaacaggtgtcattaaagatgcagataacatgacattagacagtggtttctataaaacaccaaaatatagtttaggtgattatgtttggtacgacagtaataaagacggcaaacaagattcaactgaaaaaggtatcaaagatgttaaagttactttattaaatgaaaaaggcgaagtaattggaacaactaaaacagatgaaaatggtaaatactgctttgataatttagatagcggtaaatacaaagttatttttgaaaagcctgctggcttaacacaaacaggtacaaatacaactgaagatgataaagatgcagatggtggcgaagttgacgtaacaattacggatcatgatgatttcacacttgataatggctactacgaagaagaaacatcagatagcgactcagattcggacagcgactcagattcagacagagactcagactcagatagtgattcagactcggatagcgattcagattcagacagcgattcagattcagatagcgattcagattcagacagagactcagatagtgattcagactcagatagcgactcagattcagacagcgactcagattcagacagcgactcagactcagatagtgattcagactcagatagcgactcagattcagacagcgactcagactcagacagcgactcagactcagatagtgactcagattcagatagcgactcagattcggacagcgattcagactcagatagcgactcagattcagatagcgattcggactcagatagcgactcagattcagatagtgattcagactcagatagcgactcagattcagacagcgactcagattcggatagcgactcagattcagacagcgactcagactcggatagtgattcagactcagatagcgactcagactcagatagcgattcagattcagatagcgactcagactcagacagcgattcagactcagacagcgactcagactcagatgcaggtaagcacacacctgttaaaccaatgagtactactaaagaccatcacaataaagcaaaagcattaccagaaacaggtaatgaaaatagcggctcaaataacgcaacgttatttggcggattattcgcagcattaggatcattattgttattcggtcgtcgtaaaaaacaaaataaa

SEQ ID NO: 124 - protein, 1315 aa, Staphylococcus aureus
MLNRENKTAITRKGMVSNRLNKFSIRKYTVGTASILVGTTLIFGLGNQEAKAAESTNKELNEATTSASDNQSSDKVDMQQLNQEDNTKNDNQKEMVSSQGNETTSNGNKLIEKESVQSTTGNKVEVSTAKSDEQASPKSTNEDLNTKQTISNQEALQPDLQENKSVVNVQPTNEENKKVDAKTESTTLNVKSDAIKSNDETLVDNNSNSNNENNADIILPKSTAPKRLNTRMRIAAVQPSSTEAKNVNDLITSNTTLTVVDADKNNKIVPAQDYLSLKSQITVDDKVKSGDYFTIKYSDTVQVYGLNPEDIKNIGDIKDPNNGETIATAKHDTANNLITYTFTDYVDRFNSVQMGINYSIYMDADTIPVSKNDVEFNVTIGNTTTKTTANIQYPDYVVNEKNSIGSAFTETVSHVGNKENPGYYKQTIYVNPSENSLTNAKLKVQAYHSSYPNNIGQINKDVTDIKIYQVPKGYTLNKGYDVNTKELTDVTNQYLQKITYGDNNSAVIDFGNADSAYVVMVNTKFQYTNSESPTLVQMATLSSTGNKSVSTGNALGFTNNQSGGAGQEVYKIGNYVWEDTNKNGVQELGEKGVGNVTVTVFDNNTNTKVGEAVTKEDGSYLIPNLPNGDYRVEFSNLPKGYEVTPSKQGNNEELDSNGLSSVITVNGKDNLSADLGIYKPKYNLGDYVWEDTNKNGIQDQDEKGISGVTVTLKDENGNVLKTVTTDADGKYKFTDLDNGNYKVEFTTPEGYTPTTVTSGSDIEKDSNGLTTTGVINGADNMTLDSGFYKTPKYNLGNYVWEDTNKDGKQDSTEKGISGVTVTLKNENGEVLQTTKTDKDGKYQFTGLENGTYKVEFETPSGYTPTQVGSGTDEGIDSNGTSTTGVIKDKDNDTIDSGFYKPTYNLGDYVWEDTNKNGVQDKDEKGISGVTVTLKDENDKVLKTVTTDENGKYQFTDLNNGTYKVEFETPSGYTPTSVTSGNDTEKDSNGLTTTGVIKDADNMTLDSGFYKTPKYSLGDYVWYDSNKDGKQDSTEKGIKDVKVTLLNEKGEVIGTTKTDENGKYCFDNLDSGKYKVIFEKPAGLTQTGTNTTEDDKDADGGEVDVTITDHDDFTLDNGYYEEETSDSDSDSDSDSDSDRDSDSDSDSDSDSDSDSDSDSDSDSDSDSDRDSDSDSDSDSDSDSDSDSDSDSDSDSDSDSDSDSDSDSDSDSDSDSDSDSDSDSDSDSDSDSDSDSDSDSDSDSDSDSDSDSDSDSDAGKHTPVKPMSTTKDHHNKAKALPETGNENSGSNNATLFGGLFAALGSLLLFGRRKKQNK

SEQ ID NO: 125 - DNA, 3549 bp, Staphylococcus aureus
ttggcaggtcaagttgtccaatatggaagacatcgtaaacgtagaaactacgcgagaatttcagaagtattagaattaccaaacttaatagaaattcaaactaaatcttacgagtggttcctaagagaaggtttaatcgaaatgtttagagacatttctccaattgaagattttactggtaatttgtcattagagtttgtggattaccgtttaggagaaccaaaatatgatttagaagaatctaaaaaccgtgacgctacttatgctgcacctcttcgtgtaaaagtgcgtctaatcattaaagaaacaggagaagttaaagaacaagaagtctttatgggtgatttcccattaatgactgatacaggtacgttcgttatcaatggtgcagaacgtgtaatcgtatctcaattagttcgttcaccatccgtttatttcaatgaaaaaatcgacaaaaatggtcgtgaaaactatgatgcaacaattattccaaaccgtggtgcatggttagaatatgaaacagatgctaaagatgttgtatacgtacgtattgatagaacacgtaaactaccattaacagtattgttacgtgcattaggtttctcaagcgaccaagaaattgttgaccttttaggtgacaatgaatatttacgtaatactttagagaaagacggcactgaaaacactgaacaagcgttattagaaatctatgaacgtttacgtccaggtgaaccaccaactgttgaaaatgctaaaagtctattgtattcacgtttctttgatccaaaacgctatgacttagcaagcgtgggtcgttataaaacaaacaaaaaattacatttaaaacatcgtttatttaatcaaaaattagctgagccaattgtaaatactgaaactggtgaaattgtagttgaagaaggtacagtgcttgatcgtcgtaaaatcgacgaaatcatggatgtacttgaatcaaatgcaaacagcgaagtgtttgaattgcatggtagcgttatagacgagccagtagaaattcaatcaattaaagtatatgttcctaacgatgatgaaggtcgtacgacaactgtaattggtaatgctttccctgactcagaagttaaatgcattacaccagcagatatcattgcttcaatgagttacttctttaacttattaagcggtattggatatacagatgatattgaccatttaggtaaccgtcgtttacgttctgtaggtgaattactacaaaaccaattccgtatcggtttatcaagaatggaaagagttgtacgtgaaagaatgtcaattcaagatactgagtctatcacacctcaacaattaattaatattcgacctgttattgcatctattaaagaattctttggtagctctcaattatcacaattcatggaccaagcaaacccattagctgagttaacgcataaacgtcgtctatcagcattaggacctggtggtttaacacgtgaacgtgctcaaatggaagtacgtgacgttcactactctcactatggccgtatgtgtccaattgaaacacctgagggaccaaacattggattgattaactcattatcaagttatgcacgtgtaaatgaattcggctttattgaaacaccatatcgtaaagttgatttagatacacatgctatcactgatcaaattgactatttaacagctgacgaagaagatagctatgttgtagcacaagcaaactctaaattagatgaaaatggtcgtttcatggatgatgaagttgtatgtcgtttccgtggtaacaatacagttatggctaaagaaaaaatggattatatggatgtatcgccgaagcaagttgtttcagcagcgacagcatgtattccattcttagaaaatgatgactcaaaccgtgcattgatgggtgcgaacatgcaacgtcaagcagtgcctttgatgaatccagaagcaccatttgttggtacaggtatggaacacgttgcagcacgtgattctggtgcggctattacagctaagcacagaggtcgtgttgaacatgttgaatctaatgaaattcttgttcgtcgtctagttgaagagaacggcgttgagcatgaaggtgaattagatcgctatccattagctaaatttaaacgttcaaactcaggtacatgttacaaccaacgtccaatcgttgcagttggagatgttgttgagtataacgagattttagcagatggaccatctatggaattaggagaaatggcattaggtagaaacgtagtagttggtttcatgacttgggacggttacaactatgaggatgccgttatcatgagtgaaagacttgtgaaagatgacgtgtatacttctattcatattgaagagtatgaatcagaagtacgtgatactaagttaggacctgaagaaatcacaagagatattcctaatgtttctgaaagtgcacttaagaacttagacgatcgtggtatcgtttatattggtgcagaagtaaaagatggagatattttagttggtaaagtaacgcctaaaggtgtaactgagttaactgccgaagaaagattgttacatgcaatctttggtgaaaaagcacgtgaagttagagatactttattacgtgtacctcacggcgctggcggtatcgttcttgatgtaaaagtattcaatcgtgaagaaggcgacgatacattatcacctggtgtaaaccaattagtacgtgtatatatcgttcaaaaacgtaaaattcatgttggtgataagatgtgtggtcgacatggtaacaaaggtgtcatttctaagattgttcctgaagaagatatgccttacttaccagatggacgtccgatcgatatcatgttaaatcctcttggtgtaccatctcgtatgaacatcggacaagtattagagctacacttaggtatggctgctaaaaatcttggtattcacgttgcatcaccagtatttgacggtgcaaacgatgacgatgtatggtcaacaattgaagaagctggtatggctcgtgatggtaaaactgtactttatgatggacgtacaggtgaaccattcgataaccgtatttcagtaggtgtaatgtacatgttgaaacttgcgcacatggttgatgataaattacatgcgcgttcaacaggaccatattcacttgttacacaacaaccacttggcggtaaagcgcaattcggtggacaacgttttggtgagatggaggtatgggcacttgaagcatatggtgctgcatacacattacaagaaatcttaacttacaaatccgatgatacagtaggacgtgtgaaaacatacgaggctattgttaaaggtgaaaacatctctagaccaagtgttccagaatcattccgagtattgatgaaagaattacaaagtttaggtttagatgtaaaagttatggatgagcaagataatgaaatcgaaatgacagacgttgatgacgatgatgttgtagaacgcaaagtagatttacaacaaaatgatgctcctgaaacacaaaaagaagttactgat

SEQ ID NO: 126 - protein, 1182 aa, Staphylococcus aureus
MAGQVVQYGRHRKRRNYARISEVLELPNLIEIQTKSYEWFLREGLIEMFRDISPIEDFTGNLSLEFVDYRLGEPKYDLEESKNRDATYAAPLRVKVRLIIKETGEVKEQEVFMGDFPLMTDTGTFVINGAERVIVSQLVRSPSVYFNEKIDKNGRENYDATIIPNRGAWLEYETDAKDVVYVRIDRTRKLPLTVLLRALGFSSDQEIVDLLGDNEYLRNTLEKDGTENTEQALLEIYERLRPGEPPTVENAKSLLYSRFFDPKRYDLASVGRYKTNKKLHLKHRLFNQKLAEPIVNTETGEIVVEEGTVLDRRKIDEIMDVLESNANSEVFELHGSVIDEPVEIQSIKVYVPNDDEGRTTTVIGNAFPDSEVKCITPADIIASMSYFFNLLSGIGYTDDIDHLGNRRLRSVGELLQNQFRIGLSRMERVVRERMSIQDTESITPQQLINIRPVIASIKEFFGSSQLSQFMDQANPLAELTHKRRLSALGPGGLTRERAQMEVRDVHYSHYGRMCPIETPEGPNIGLINSLSSYARVNEFGFIETPYRKVDLDTHAITDQIDYLTADEEDSYVVAQANSKLDENGRFMDDEVVCRFRGNNTVMAKEKMDYMDVSPKQVVSAATACIPFLENDDSNRALMGANMQRQAVPLMNPEAPFVGTGMEHVAARDSGAAITAKHRGRVEHVESNEILVRRLVEENGVEHEGELDRYPLAKFKRSNSGTCYNQRPIVAVGDVVEYNEILADGPSMELGEMALGRNVVVGFMTWDGYNYEDAVIMSERLVKDDVYTSIHIEEYESRRQRDTKLGPEEITRDIPNVSESALKNLDDRGIVYIGAEVKDGDILVGKVTPKGVTELTAEERLLHAIFGEKAREVRDTSLRVPHGAGGIVLDVKVFNREEGDDTLSPGVNQLVRVYIVQKRKIHVGDKMCGRHGNKGVISKIVPEEDMPYLPDGRPIDIMLNPLGVPSRMNIGQVLELHLGMAAKNLGIHVASPVFDGANDDDVWSTIEEAGMARDGKTVLYDGRTGEPFDNRISVGVMYMLKLAHMVDDKLHARSTGPYSLVTQQPLGGKAQFGGQRFGEMEVWALEAYGAAYTLQEILTYKSDDTVGRVKTYEAIVKGENISRPSVPESFRVLMKELQSLGLDVKVMDEQDNEIEMTDVDDDDVVERKVDLQQNDAPETQKSY

SEQ ID NO: 127 - DNA, 2145 bp, Staphylococcus aureus
atgcttagggcatcgccatatctatcgtatttattcagtaatataaactggaaggagaaaaaatacatggctagagaattttcattagaaaaaactcgtaatatcggtatcatggctcacattgatgctggtaaaacgactacgactgaacgtattctttattacactggccgtatccacaaaattggtgaaacacacgaaggtgcttcacaaatggactggatggagcaagaacaagaccgtggtattactatcacatctgctgcaacaacagcagcttgggaaggtcaccgtgtaaacattatcgatacacctggacacgtagacttcactgtagaagttgaacgttcattacgtgtacttgacggagcagttacagtacttgatgcacaatcaggtgttgaacctcaaactgaaacagtttggcgtcaggctacaacttatggtgttccacgtatcgtatttgtaaacaaaatggacaaattaggtgctaacttcgaatactctgtaagtacattacatgatcgtttacaagctaacgctgctccaatccaattaccaattggtgcggaagacgaattcgaagcaatcattgacttagttgaaatgaaatgtttcaaatatacaaatgatttaggtactgaaattgaagaaattgaaattcctgaagaccacttagatagagctgaagaagctcgtgctagcttaatcgaagcagttgcagaaactagcgacgaattaatggaaaaatatcttggtgacgaagaaatttcagtttctgaattaaaagaagctatccgccaagctactactaacgtagaattctacccagtactttgtggtacagctttcaaaaacaaaggtgttcaattaatgcttgacgctgtaattgattacttaccttcaccactagacgttaaaccaattattggtcaccgtgctagcaaccctgaagaagaagtaatcgcgaaagcagacgattcagctgaattcgctgcattagcgttcaaagttatgactgacccttatgttggtaaattaacattcttccgtgtgtattcaggtacaatgacatctggttcatacgttaagaactctactaaaggtaaacgtgaacgtgtaggtcgtttattacaaatgcacgctaactcacgtcaagaaatcgatactgtatactctggagatatcgctgctgcggtaggtcttaaagatacaggtactggtgatactttatgtggtgagaaaaatgacattatcttggaatcaatggaattcccagagccagttattcacttatcagtagagccaaaatctaaagctgaccaagataaaatgactcaagctttagttaaattacaagaagaagacccaacattccatgcacacactgacgaagaaactggacaagttatcatcggtggtatgggtgagcttcacttagacatcttagtagaccgtatgaagaaagaattcaacgttgaatgtaacgtaggtgctccaatggtttcatatcgtgaaacattcaaatcatctgcacaagttcaaggtaaattctctcgtcaatctggtggtcgtggtcaatacggtgatgttcacattgaattcacaccaaacgaaacaggcgcaggtttcgaattcgaaaacgctatcgttggtggtgtagttcctcgtgaatacattccatcagtagaagctggtcttaaagatgctatggaaaatggtgttttagcaggttatcctttaattgatgttaaagctaaattatatgatggttcataccatgatgtcgattcatctgaaatggccttcaaaattgctgcatcattagcacttaaagaagctgctaaaaaatgtgatcctgtaatcttagaaccaatgatgaaagtaactattgaaatgcctgaagagtacatgggtgatatcatgggtgacgtaacatctcgtcgtggacgtgttgatggtatggaacctcgtggtaatgcacaagttgttaatgcttatgtaccactttcagaaatgttcggttatgcaacatcattacgttcaaacactcaaggtcgcggtacttacactatgtacttcgatcactatgctgaagttccaaaatcaatcgctgaagatattatcaagaaaaataaaggtgaa

SEQ ID NO: 128 - protein, 693 aa, Staphylococcus aureus
MAREFSLEKTRNIGIMAHIDAGKTTTTERILYYTGRIHKIGETHEGASQMDWMEQEQDRGITITSAATTAAWEGHRVNIIDTPGHVDFTVEVERSLRVLDGAVTVLDAQSGVEPQTETVWRQATTYGVPRIVFVNKMDKLGANFEYSVSTLHDRLQANAAPIQLPIGAEDEFEAIIDLVEMKCFKYTNDLGTEIEEIEIPEDHLDRAEEARASLIEAVAETSDELMEKYLGDEEISVSELKEAIRQATTNVEFYPVLCGTAFKNKGVQLMLDAVIDYLPSPLDVKPIIGHRASNPEEEVIAKADDSAEFAALAFKVMTDPYVGKLTFFRVYSGTMTSGSYVKNSTKGKRERVGRLLQMHANSRQEIDTVYSGDIAAAVGLKDTGTGDTLCGEKNDIILESMEFPEPVIHLSVEPKSKADQDKMTQALVKLQEEDPTFHAHTDEETGQVIIGGMGELHLDILVDRMKKEFNVECNVGAPMVSYRETFKSSAQVQGKFSRQSGGRGQYGDVHIEFTPNETGAGFEFENAIVGGVVPREYIPSVEAGLKDAMENGVLAGYPLIDVKAKLYDGSYHDVDSSEMAFKIAASLALKEAAKKCDPVILEPMMKVTIEMPEEYMGDIMGDVTSRRGRVDGMEPRGNAQVVNAYVPLSEMFGYATSLRSNTQGRGTYTMYFDHYAEVPKSIAEDIIKKNKGE

SEQ ID NO: 129 - DNA, 513 bp, Staphylococcus aureus
atgactaaaaaagtagcaattattctagcaaacgaatttgaagatatagaatattcaagccctaaagaggcattagagaatgcaggctttaatactgtagtgattggagatactgcaaatagtgaagttgttggtaaacacggtgaaaaagttactgtcgatgtaggcattgcagaagctaaaccagaagattatgatgcattattaattcctggaggattttcaccagatcatttacgtggagatacagaaggtcgatatggcacatttgctaaatactttactaaaaatgatgtaccaacatttgccatttgtcatgggccacaaatactaatagatacagacgatttaaaaggtcgtacgttaacagcagtattaaatgtacgcaaagatttatcaaatgcaggcgcacatgtagttgatgagtcagtagttgtagacaacaatattgtaacaagtcgagtaccagacgatttagatgattttaatcgagaaatcgttaaacaattacaa

SEQ ID NO: 130 - protein, 171 aa, Staphylococcus aureus
MTKKVAIILANEFEDIEYSSPKEALENAGFNTVVIGDTANSEVVGKHGEKVTVDVGIAEAKPEDYDALLIPGGFSPDHLRGDTEGRYGTFAKYFTKNDVPTFAICHGPQILIDTDDLKGRTLTAVLNVRKDLSNAGAHVVDESVVVDNNIVTSRVPDDLDDFNREIVKQLQ

SEQ ID NO: 131 - DNA, 366 bp, Staphylococcus aureus
atggctaatcatgaacaaatcattgaagcgattaaagaaatgtcagtattagaattaaacgacttagtaaaagcaattgaagaagaatttggtgtaactgcagctgctccagtagcagtagcaggtgcagctggtggcgctgacgctgcagcagaaaaaactgaatttgacgttgagttaacttcagctggttcatctaaaatcaaagttgttaaagctgttaaagaagcaactggtttaggattaaaagatgctaaagaattagtagacggagctcctaaagtaatcaaagaagctttacctaaagaagaagctgaaaaacttaaagaacaattagaagaagttggagctactgtagaattaaaa

SEQ ID NO: 132 - protein, 122 aa, Staphylococcus aureus
MANHEQIIEAIKEMSVLELNDLVKAIEEEFGVTAAAPVAVAGAAGGADAAAEKTEFDVELTSAGSSKIKVVKAVKEATGLGLKDAKELVDGAPKVIKEALPKEEAEKLKEQLEEVGATVELK

SEQ ID NO: 133 - DNA, 630 bp, Staphylococcus aureus
gtggaattacaattagcaattgatttattaaacaaagaagacgcggctgagttagcaaataaagtaaaagattatgtagatatcgtagaaatcggtacgccaatcatttacaacgaaggtttaccagcagttaaacatatggcagacaacattagtaatgtaaaagtattagcagacatgaaaattatggatgcagctgattatgaagttagccaagcaattaaatttggcgcggatgtaattacaatactaggtgttgcagaagatgcatcaattaaagcagctattgaagaagctcataaaaataataaacaattactagttgatatgattgctgttcaagatttagaaaaacgtgcaaaagaactagatgaaatgggtgctgattatattgcagtacacactggttatgatttacaagcagaagggcaatcaccattagaaagtttaagaaccgttaaatctgttattaaaaattctaaagttgcagtagcaggtggaattaaaccagatacaattaaagatattgtcgctgaaagtcctgatcttgttattgttggtggcggaatcgcaaatgcagatgatccagtagaagctgcaaaacaatgtcgcgctgcaatcgaaggtaag

SEQ ID NO: 134 - protein, 210 aa, Staphylococcus aureus
MELQLAIDLLNKEDAAELANKVKDYVDIVEIGTPIIYNEGLPAVKHMADNISNVKVLADMKIMDAADYEVSQAIKFGADVITILGVAEDASIKAAIEEAHKNNKQLLVDMIAVQDLEKRAKELDEMGADYIAVHTGYDLQAEGQSPLESLRTVKSVIKNSKVAVAGGIKPDTIKDIVAESPDLVIVGGGIANADDPVEAAKQCRAAIEGK

SEQ ID NO: 135 - DNA, 927 bp, Staphylococcus aureus
atgaaaaaattagtacctttattattagccttattacttctagttgctgcatgtggtactggtggtaaacaaagcagtgataagtcaaatggcaaattaaaagtagtaacgacgaattcaattttatatgatatggctaaaaatgttggtggagacaacgtcgatattcatagtattgtacctgttggtcaagatcctcatgaatatgaagttaaacctaaagatattaaaaagttaactgacgctgacgttattttatacaacggattaaatttagagactggtaacggttggtttgaaaaagccttagaacaggctggtaaatcattaaaagataaaaaagttatcgcagtatcaaaagatgttaaacctatctatttaaacggtgaagaaggcaacaaagataaacaagatccacacgcatggttaagtttagataacggtattaaatacgtaaaaacaattcaacaaacatttatcgataacgacaaaaaacataaagcagattatgaaaagcaaggtaacaaatacattgctcaattggaaaaattaaataatgacagtaaagacaaatttaatgacattccaaaagaacaacgtgccatgattacaagtgaaggtgccttcaagtacttctcaaaacaatacggtattacaccaggttatatttgggaaattaacactgaaaaacaaggtacacctgaacaaatgagacaagctattgagtttgttaaaaagcacaaattaaaacacttattagtagaaacaagtgttgataagaaagcaatggaaagtttatctgaagaaacgaagaaagatatctttggtgaagtgtacacagattcaatcggtaaagaaggcactaaaggtgactcttactacaaaatgatgaaatcaaatattgaaactgtacacggaagcatgaaa

SEQ ID NO: 136 - protein, 309 aa, Staphylococcus aureus
MKKLVPLLLALLLLVAACGTGGKQSSDKSNGKLKVVTTNSILYDMAKNVGGDNVDIHSIVPVGQDPHEYEVKPKDIKKLTDADVILYNGLNLETGNGWFEKALEQAGKSLKDKKVIAVSKDVKPIYLNGEEGNKDKQDPHAWLSLDNGIKYVKTIQQTFIDNDKKHKADYEKQGNKYIAQLEKLNNDSKDKFNDIPKEQRAMITSEGAFKYFSKQYGITPGYIWEINTEKQGTPEQMRQAIEFVKKHKLKHLLVETSVDKKAMESLSEETKKDIFGEVYTDSIGKEGTKGDSYYKMMKSNIETVHGSMK

SEQ ID NO: 137 - DNA, 1305 bp, Staphylococcus aureus
atgacaactgatattttgaacatttctgaagaacaacttgttgattattctaaagcccacaatgaaccttcttggatgacagaattacgtaaaaaagctttgaaattaacagaaactttagaaatgccaaaacctgataaaacaaaattaagaaaatgggattttgattcttttaaacaacacgatgtaaaaggtgatgtttatcaatctttatcacaattacctgagtcagtaagagaaattattgacgtagatcattctaaaaacttagtaattcaacataataatacgattgcgtacacacaagttgatgataatgcatcgaaagatggcgttatcgttgaaggtttagcagacgctcttatgaaccatagtgatttagtacaaaagtactttatgaaagatgcagtaacagtagatgaacatcgtatcacagcgctacacacggcattagttaatggtggcgtatttgtttatgttcctaaaaatgtagttgtagaacatccagtacaatacgttgtgttgcacgacgacgaaaatgcaagcttttataaccatgttatcatcgttactgaagaaagcgccgaagtcacatatgttgaaaattacttatcaaatgcatctggtgaaggaaatcaattaaatattatttctgaagtgattgctggtgcaaattcaaatatcacatatggctcagtggactatatggataaaggctttacaggtcatatcattcgacgtggtattactgaagcggatgcctcaattaattgggcactaggtttaatgaatgagggtagccaaattattgataatacaacaaatttatttggtgatcgttcaacaagttcacttaaatcagtagttgtaggtacaggcgaacaaaaaattaatctaacatctaaaatcgtacaatatggtaaagaaacagatggttatatccttaaacatggtgttatgaaagaacatgcatcgtctgtatttaatggtatcggctacattaagcatggtggaactaaatcaattgctaatcaggaatcacgtgtattaatgttatctgaacatgctcgtggtgacgcgaatcctattttattaattgatgaagatgatgtacaagctggtcatgctgcatcagtaggtcgtgttgatccagatcaactttactatttaatgagtcgtggtatttctcaaagagaagcggaacgtcttgttatacatggtttcttagatccagtagtacgtgaattacctatcgaagacgttaaacgtcaattgagagaagtaattgaacgcaaagtttctaaa

SEQ ID NO: 138 - protein, 435 aa, Staphylococcus aureus
MTTDILNISEEQLVDYSKAHNEPSWMTELRKKALKLTETLEMPKPDKTKLRKWDFDSFKQHDVKGDVYQSLSQLPESVREIIDVDHSKNLVIQHNNTIAYTQVDDNASKDGVIVEGLADALMNHSDLVQKYFMKDAVTVDEHRITALHTALVNGGVFVYVPKNVVVEHPVQYVVLHDDENASFYNHVIIVTEESAEVTYVENYLSNASGEGNQLNIISEVIAGANSNITYGSVDYMDKGFTGHIIRRGITEADASINWALGLMNEGSQIIDNTTNLFGDRSTSSLKSVVVGTGEQKINLTSKIVQYGKETDGYILKHGVMKEHASSVFNGIGYIKHGGTKSIANQESRVLMLSEHARGDANPILLIDEDDVQAGHAASVGRVDPDQLYYLMSRGISQREAERLVIHGFLDPVVRELPIEDVKRQLREVIERKVSK

SEQ ID NO: 139 - DNA, 1875 bp, Staphylococcus aureus
gtggttcaagaatatgatgtaatcgttataggtgcgggacatgcaggtgtagaagcaggtttagcatctgcaagacgtggtgctaaaacattaatgctaacaataaatttagataatattgcatttatgccatgtaacccatctgtaggtggaccagctaaaggtatcgttgttcgtgaaattgatgctttaggtggacaaatggcaaaaacaatcgataaaacacacattcaaatgagaatgttaaatacaggtaaaggacctgctgtaagagcactaagagcgcaagcagataaagtactttatcaacaagaaatgaaacgcgtgattgaagatgaagaaaatttgcatataatgcaaggtatggtagacgaacttattatagaagataatgaagttaaaggtgtacgtacaaatattggtacagagtatttatctaaagcagtaattattacaacgggaacatttttacgtggtgaaatcattttaggtaatatgaagtattcaagtggaccaaatcaccaattaccatcaatcacattatcagacaatttaagagaacttggttttgatattgttcgttttaaaacaggtacaccaccgcgtgtaaattcaaaaacaattgactattcgaagactgaaatacaaccaggtgacgatgtaggtcgtgcattcagctttgaaacaacagaatatatattagatcaattgccatgttggctaacgtatactaatgctgaaacacacaaagttatcgatgataatttacatctatctgcaatgtattcagggatgattaaaggaaccgggccacgttattgcccttcaattgaagataaatttgttcgatttaatgataagccgcgacatcaacttttcttagagcctgaaggtcgtaatacaaatgaagtatatgtgcaaggattgtctacaagtcttcctgaacatgtgcaacgtcaaatgttagagacgataccaggtcttgaaaaagcagatatgatgcgtgccggctacgcaattgaatatgatgcgattgtgccaacgcagttatggcctacacttgaaacgaaaatgattaaaaacttatatactgcaggtcaaattaatggtacatctggttatgaagaagcagcaggacaaggattgatggcaggtattaacgctgcaggtaaagtgttaaacacaggcgaaaagatattaagtcgttcagatgcatatattggtgtcttaatcgatgatcttgtaactaaaggtactaatgaaccttatcgtttactaacatcacgtgcagaatatcgtttgttactacgtcatgataatgctgatttgagattgacggatatgggatatgaacttggtatgatttctgaagaaagatatgcacgttttaatgaaaaacgtcagcaaattgatgcggaaattaagcgtttatcagatattcgtattaaaccaaacgaacatacgcaagcgattattgaacaacatggtggttctcgcttaaaagatggtattttagctatcgatttattacgcagacctgaaatgacttacgatataattttagaacttttagaagaagaacatcaattgaatgcagatgttgaagaacaagtagaaatacaaacaaaatatgaaggttatatcaataaatcactacaacaagttgagaaagttaagcgtatggaagagaagaaaattccagaagacttagattatagtaagattgatagtttggcgactgaagcgcgagaaaaattatcagaagtaaaacctttaaatattgcacaagcttctagaatatcaggggtaaatccagcagacatatctatattattgatttacttagaacaaggtaaactccaaagggtgagtgac

SEQ ID NO: 140 - protein, 625 aa, Staphylococcus aureus
MVQEYDVIVIGAGHAGVEAGLASARRGAKTLMLTINLDNIAFMPCNPSVGGPAKGIVVREIDALGGQMAKTIDKTHIQMRMLNTGKGPAVRALRAQADKVLYQQEMKRVIEDEENLHIMQGMVDELIIEDNEVKGVRTNIGTEYLSKAVIITTGTFLRGEIILGNMKYSSGPNHQLPSITLSDNLRELGFDIVRFKTGTPPRVNSKTIDYSKTEIQPGDDVGRAFSFETTEYILDQLPCWLTYTNAETHKVIDDNLHLSAMYSGMIKGTGPRYCPSIEDKFVRFNDKPRHQLFLEPEGRNTNEVYVQGLSTSLPEHVQRQMLETIPGLEKADMMRAGYAIEYDAIVPTQLWPTLETKMIKNLYTAGQINGTSGYEEAAGQGLMAGINAAGKVLNTGEKILSRSDAYIGVLIDDLVTKGTNEPYRLLTSRAEYRLLLRHDNADLRLTDMGYELGMISEERYARFNEKRQQIDAEIKRLSDIRIKPNEHTQAIIEQHGGSRLKDGILAIDLLRRPEMTYDIILELLEEEHQLNADVEEQVEIQTKYEGYINKSLQQVEKVKRMEEKKIPEDLDYSKIDSLATEAREKLSEVKPLNIAQASRISGVNPADISILLIYLEQGKLQRVSD

SEQ ID NO: 141 - protein, 389 aa, Staphylococcus aureus
  MOD_RES (19): X = anything
LMINEREVFILIYLDNAAXTKAFEEVLDTYLKVNQSMYYNPNSPHKAGLQANQLLQQAKTQINAMINSKTNYDVVFTSGATESNNLALKGIAYRKFDTAKEIITSVLEHPSVLEVVRYLEAHEGFKVKYVDVKKDGSINLEHFKELMSDKVGLVTCMYVNNVTGQIQPIPQMAKVIKNYPKAHFHVDAVQAFGKISMDLNNIDSISLSGHKFNGLKGQGVLLVNHIQNVEPTVHGGGQEYGVRSGTVNLPNDIAMVKAMKIANENFEALNAFVTELNNDVRQFLNKYHGVYINSSTSGSPFVLNISFPGVKGEVLVNAFSKYDIMISTTSACSSKRNKLNEVLAAMGLSDKSIEGSIRLSFGATTTKEDIARFKEIFIIIYEEIKELLK

SEQ ID NO: 142 - protein, 645 aa, Staphylococcus aureus
MNKQQKEFKSFYSIRKSSLGVASVAISTLLLLMSNGEAQAAAEETGGTNTEAQPKTEAVASPTTTSEKAPETKPVANAVSVSNKEVEAPTSETKEAKEVKEVKAPKETKEVKPAAKATNNTYPILNQELREAIKNPAIKDKDHSAPNSRPIDFEMKKKDGTQQFYHYASSVKPARVIFTDSKPEIELGLQSGQFWRKFEVYEGDKKLPIKLVSYDTVKDYAYIRFSVSNGTKAVKIVSSTHFNNKEEKYDYTLMEFAQPIYNSADKFKTEEDYKAEKLLAPYKKAKTLERQVYELNKIQDKLPEKLKAEYKKKLEDTKKALDEQVKSAITEFQNVQPTNEKMTDLQDTKYVVYESVENNESMMDTFVKHPIKTGMLNGKKYMVMETTNDDYWKDFMVEGQRVRTISKDAKNNTRTIIFPYVEGKTLYDAIVKVHVKTIDYDGQYHVRIVDKEAFTKANTDKSNKKEQQDNSAKKEATPATPSKPTPSPVEKESQKQDSQKDDNKQLPSVEKENDASSESGKGVTLATKPTKGEVESSSTTPTKVVSTTQNVAKPTTGSSKTTKDVVQTSAGSSEAKDSAPLQKANIKHTNDGHTQSQNNKNTQENKAKSLPQTGEESNKDMTLPLMALLALSSIVAFVLPRKRKN

SEQ ID NO: 143 - DNA, 3822 bp, Staphylococcus aureus
atgagctggtttgataaattattcggcgaagataatgattcaaatgatgacttgattcatagaaagaaaaaaagacgtcaagaatcacaaaatatagataacgatcatgactcattactgcctcaaaataatgatatttatagtcgtccgaggggaaaattccgttttcctatgagcgtagcttatgaaaatgaaaatgttgaacaatctgcagatactatttcagatgaaaaagaacaataccatcgagactatcgcaaacaaagccacgattctcgttcacaaaaacgacatcgccgtagaagaaatcaaacaactgaagaacaaaattatagtgaacaacgtgggaattctaaaatatcacagcaaagtataaaatataaagatcattcacattaccatacgaataagccaggtacatatgtttctgcaattaatggtattgagaaggaaacgcacaagccaaaaacacataatatgtattctaataatacaaatcatcgtgctaaagattcaactccagattatcacaaagaaagtttcaagacttcagaggtaccgtcagctatttttggcacaatgaaacctaaaaagttagaaaatggtcgtatccctgtaagtaaaccttcagaaaaagttgagtcagataaacaaaaatatgataaatatgtagctaagacgcaaacgtctcaaaataaacaattagaacaagaaaaacaaaatgatagtgttgtcaaacaaggaactgcatctaaatcatctgatgaaaatgtatcatcaacaacaaaatcaatgcctaattattcaaaagttgataatactatcaaaattgaaaatatttatgcttcacaaattgttgaagaaattagacgtgaacgagaacgtaaagtgcttcaaaagcgtcgatttaaaaaagcgttgcaacaaaagcgtgaagaacataaaaacgaagagcaagatgcaatacaacgtgcaattgatgaaatgtatgctaaacaagcggaacgctatgttggtgatagttcattaaatgatgatagtgacttaacagataatagtacagatgctagtcagcttcatacaaatggcatagagaatgaaactgtatcaaatgatgaaaataaacaagcgtcaatacaaaatgaagacactaatgacactcatgtagatgaaagtccatacaattatgaggaagttagtttgaatcaagtatcgacaacaaaacaattgtcagatgatgaagttacggtttcgaatgtaacgtctcaacatcaatcagcactacaacataacgttgaagtaaatgataaagatgaactaaaaaatcaatccagattaattgctgattcagaagaagatggagcaacgaataaagaagaatattcaggaagtcaaatcgatgatgcagaattttatgaattaaatgatacagaagtagatgaggatactacttcaaatatcgaagataataccaatagaaacgcgtctgaaatgcatgtagacgctcctaaaacgcaagagtacgcagtaactgaatctcaagtaaataatatcgataaaacggttgataatgaaattgaattagcaccgcgtcataaaaaagatgaccaaacaaacttaagtgtcaactcattgaaaacgaatgatgtgaatgataatcatgttgtggaagattcaagcatgaatgaaatagaaaagaataacgcagaaattacagaaaatgtgcaaaacgaagcagctgaaagtgaacaaaatgtcgaagagaaaactattgaaaacgtaaatccaaagaaacagactgaaaaggtttcaactttaagtaaaagaccatttaatgttgtcatgacgccatctgataaaaagcgtatgatggatcgtaaaaagcattcaaaagtcaatgtgcctgaattaaagcctgtacaaagtaagcaagctgtgagtgaaagaatgcctgcgagtcaagccacaccatcatcaagatctgattcacaagagtcaaatacaaatgcatataaaacaaataatatgacatcaaacaatgttgagaacaatcaacttattggtcatgcagaaacagaaaatgattatcaaaatgcacaacaatattcagagcagaaaccttctgttgattcaactcaaacggaaatatttgaagaaagtcaagatgataatcaattggaaaatgagcaagttgatcaatcaacttcgtcttcagtttcagaagtaagcgacataactgaagaaagcgaagaaacaacacatccaaacaatactagtggacaacaagataatgatgatcaacaaaaagatttacagtcatcattttcaaataaaaatgaagatacagctaatgaaaatagacctcggacgaaccaacaagatgttgcaacaaatcaagctgtacaaacatctaagccgatgattcgtaaaggcccaaatattaaattgccaagtgtttcattactagaagaaccacaagttattgagtcggacgaggactggattacagataaaaagaaagaactgaatgacgcattattttactttaatgtacctgcagaagtacaagatgtaactgaaggtccaagtgttacaagatttgaattatcagttgaaaaaggtgttaaagtttcaagaattacggcattacaagatgacattaaaatggcattggcagcgaaagatattcgtatagaagcgcctattccaggaactagtcgtgttggtattgaagttccgaaccaaaatccaacgacagtcaacttacgttctattattgaatctccaagttttaaaaatgctgaatctaaattaacagttgcgatggggtatagaattaataatgaaccattacttatggatattgctaaaacgccacacgcactaattgcaggtgcaactggatcagggaaatcagtttgtatcaatagtattttgatgtctttactatataaaaatcatcctgaggaattaagattattacttatcgatccaaaaatggttgaattagctccttataatggtttgccacatttagttgcaccggtaattacagatgtcaaagcagctacacagagtttaaaatgggccgtagaagaaatggaacgacgttataagttatttgcacattaccatgtacgtaatataacagcatttaacaaaaaagcaccatatgatgaaagaatgccaaaaattgtcattgtaattgatgagttggctgatttaatgatgatggctccgcaagaagttgaacagtctattgctagaattgctcaaaaagcgagagcatgtggtattcatatgttagtagctacgcaaagaccatctgtcaatgtaattacaggtttaattaaagccaacataccaacaagaattgcatttatggtatcatcaagtgtagattcgagaacgatattagacagtggtggagcagaacgcttgttaggatatggcgatatgttatatcttggtagcggtatgaataaaccgattagagttcaaggtacatttgtttctgatgacgaaattgatgatgttgttgattttatcaaacaacaaagagaaccggactatctatttgaagaaaaagaattgttgaaaaaaacacaaacacaatcacaagatgaattatttgatgatgtttgtgcatttatggttaatgaaggacatatttcaacatcattaatccaaagacatttccaaattggctataatagagcagcaagaattatcgatcaattagagcaactcggttatgtttcgagtgctaatggttcaaaaccaagggatgtttatgttacggaagcagatttaaataaagaa

SEQ ID NO: 144 - DNA, 3171 bp, Staphylococcus aureus
atgcctaaacgtaatgatatcaaaacaattttagtaatagggtctgggccaattatcataggtcaagcagctgaatttgattatgctggaacacaagcatgtctagctttaaaagaagagggatatcgagttattcttgtaaattcaaatccagcgacaatcatgactgataaggaaattgcggataaagtatatatcgaaccgttaactcatgattttatagcgcgaattatacgtaaagagcaacctgacgctttacttccaactttaggtggtcaaacaggtttaaacatggcgattcaactacacgaaagtggtgtgcttcaagataataacgtccaattattaggaactgagctaacatcaattcaacaagcagaagaccgtgaaatgtttagaacattaatgaatgatttaaacgttcctgtaccagagagtgacattgtaaatacagtagagcaagcctttaaattcaaagagcaagtgggatacccgctaattgttagaccggcatttacgatgggtggtaccggaggcggtatttgtcataatgatgaagaattacatgaaatcgtctcaaatggtcttcattatagtccagcaacgcaatgtttattagaaaaatctatcgcaggttttaaagaaatcgaatacgaagtaatgcgtgataaaaacgataatgccatcgttgtatgtaacatggaaaatattgatccagttggtattcatacaggcgattcaattgttgtggctcctagtcaaacattatcagatgttgagtatcaaatgttacgtgatgtttcattaaaagttattcgagctttaggtatcgaaggtggttgtaatgttcaattagcattagatccccattcattcgattattatattatagaagtaaatccgcgtgtatcacgttcatcagcgttagcttcaaaagcaacaggatatcctattgcaaaattagctgctaaaatcgcggttggtctaacattagatgaaatgttaaatccaattacaggaacatcttatgcagcgtttgaaccaactttagactatgtgatttcaaaaataccaagatttccttttgataaatttgaaaaaggagaacgagagcttggcacacaaatgaaagcaacaggtgaagttatggccattggtcgaacttacgaagaatcattgttaaaagcaattcgatcacttgagtatggtgtgcatcacttaggattaccaaatggtgaaagcttcgatcttgattatattaaagaacgtatttcacaccaagatgatgaacgattatttttcatcggcgaagcaattagaagaggcacaacattagaagaaattcataatatgactcagattgattacttcttcttacacaagttccaaaacattattgatattgagcatcaattaaaagagcatcaaggtgatttagaatatcttaaatatgcaaaagattatggatttagtgataaaacaatagcgcatcgctttaatatgacggaagaagaagtatatcaattgcgtatggaaaatgatattaaacctgtttacaagatggttgatacttgcgcagctgaatttgaatcttcaacaccatattattatggtacatacgaaactgaaaatgaatccatagttactgacaaagaaaaaatcttagtattaggctctggaccaattcgaatcggccaaggtgtagaatttgactatgcgacagttcatgccgtttgggcaattcaaaaagcagggtacgaagcgataattgtgaataacaatccagaaacagtttcaacagacttctcaatttctgacaaattatactttgaacctttaactgaagaagatgtgatgaatatcattaatttagaaaaacctaaaggtgtcgttgtacaatttggaggacaaacagcgattaatttagcagacaaattggctaaacatggtgttaaaatacttggtacttcactagaaaatctaaatcgtgctgaagatagaaaagaatttgaagcactattaagaaaaattaacgtgccacagccacaagggaaaacagctacatcacctgaggaagcattagcgaatgctgcagaaatcggatatccggttgtagtaagaccttcttatgtattaggtggtcgcgcaatggaaattgtagacaatgacaaagagttagaaaactatatgacccaggctgtaaaagcgagtccggaacatccggtactagtcgatagatatttaactggtaaagaaattgaagttgatgcgatttgtgatggagaaacggtcattattccaggaatcatggaacatattgaacgtgctggtgtgcatagtggtgactcaatcgctgtatatccaccacaaactttgacagaagacgagttagcaacacttgaggactatactataaaattagctaaaggtttaaacatcattggcttaatcaacattcaattcgttatagctcacgatggtgtgtatgttttagaagtaaatccacgttctagtagaacggtaccattcttaagtaaaattactgatattccaatggcacaattagctatgcgagcaatcattggggaaaaactaacagatatgggttatcaagaaggggttcaaccatatgctgagggtgtctttgtgaaagcaccagtatttagttttaataaattgaaaaatgttgatattactttaggacctgaaatgaagtcaacaggtgaagtgatggggaaagatactacattagaaaaggcgttattcaaagggttaacaggtagtggcgttgaagttaaagatcacggtacagtattaatgaccgtcagtgacaaagataaagaggaagttgttaaattggcacaacgcttaaatgaagttggctataaaattttagcaacgtctggaacagctaataaattagctgagtatgacatacctgcagaagtagtaggcaaaattggtggcgaaaatgatttattaacacgtattcaaaatggtgatgttcaaatcgttataaatacaatgactaaaggtaaagaagtagaaagggatggcttccaaattagacgtactacagttgaaaatggtattccatgtttgacatctttagatacagctaatgccttaacgaatgtaattgaaagtatgacatttacaatgcgtcaaatg

SEQ ID NO: 145 - DNA, 3498 bp, Staphylococcus aureus
atgattaacagggataataaaaaggcaataacaaaaaagggtatgatttcaaatcgcttaaacaaattttcgattagaaagtatactgtaggaactgcatcgattttagtaggtacgacattgatttttggtctagggaaccaagaagctaaagctgctgaaaacactagtacagaaaatgcaaaacaagatgatgcaacgactagtgataataaagaagtagtgtcggaaactgaaaataattcgacaacagaaaataattcaacaaatccaattaagaaagaaacaaatactgattcacaaccagaagctaaaaaagaatcaacttcatcaagtactcaaaaacagcaaaataacgttacagctacaactgaaactaagcctcaaaacattgaaaaagaaaatgttaaaccttcaactgataaaactgcgacagaagatacatctgttattttagaagagaagaaagcaccaaataatacaaataacgatgtaactacaaaaccatctacaagtgaaccatctacaagtgaaattcaaacaaaaccaactacacctcaagaatctacaaatattgaaaattcacaaccgcaaccaacgccttcaaaagtagacaatcaagttacagatgcaactaatccaaaagaaccagtaaatgtgtcaaaagaagaacttaaaaaaaatcctgagaaattaaaagaattggttagaaatgatagcaatacagatcattcaactaaaccagttgctacagctccaacaagtgttgcaccaaaacgtgtaaacgcaaaaatgcgctttgcagttgcacaaccagcagcagttgcttcaaacaatgtaaatgatttaattaaagtgacgaagcaaacaatcaaagttggcgatggtaaagataatgtggcagcagcgcatgacggtaaagatattgaatatgatacagagtttacaattgacaataaagtcaaaaaaggcgatacaatgacgattaattatgataagaatgtaattccttcggatttaacagataaaaatgatcctatcgatattactgatccatcaggagaggtcattgctaaaggaacatttgataaagcaactaagcaaatcacatatacatttacagactatgtagataaatatgaagatataaaatcacgcttaactctatattcgtatattgataaaaaaacagttccaaatgagacaagtttgaatttaacatttgctacagcaggtaaagaaacaagccaaaatgtcactgttgattatcaagatccaatggtccatggtgattcaaacattcaatctatctttacaaaattagatgaagataagcaaactattgaacaacaaatttatgttaacccattgaaaaaatcagcaaccaacactaaagttgatatagctggtagtcaagtagatgattatggaaatattaaactaggaaatggtagcaccattattgaccaaaatacagaaataaaggtttataaagttaactctgatcaacaattgcctcaaagtaatagaatctatgattttagtcaatacgaagatgtaacaagtcaatttgataataaaaaatcatttagtaataatgtagcaacattggattttggtgatattaattcagcctatattatcaaagttgttagtaaatatacacctacatcagatggcgaactagatattgcccaaggtactagtatgagaacaactgataaatatggttattataattatgcaggatattcaaacttcatcgtaacttctaatgacactggcggtggcgacggtactgttaaacctgaagaaaagttatacaaaattggtgactatgtatgggaagacgttgataaagacggtgttcaaggtacagattcaaaagaaaaaccaatggcaaacgttttagttacattaacttacccggacggtactacaaaatcagtaagaacagatgctaatggtcattatgaattcggtggtttgaaagacggagaaacttatacagttaaattcgaaacgccaactggatatcttccaacaaaagtaaatggaacaactgatggtgaaaaagactcaaatggtagttcggttactgttaaaattaatggtaaagatgatatgtctttagatactggtttttacaaagaacctaaatacaacttaggtgactatgtatgggaagatactaataaagatggtatccaagatgcaaatgagccaggaatcaaagatgttaaggttacattaaaagatagtactggaaaagttattggtacaactactactgatgcctcgggtaaatataaatttacagatttagataatggtaactatacagtagaatttgaaacaccagcaggttacacgccaacggttaaaaatactacagctgatgataaagattctaatggtttaacaacaacaggtgtcattaaagatgcagataatatgacattagacaggggtttctataaaacaccaaaatacagtttaggtgattatgtttggtacgacagtaataaagacggcaaacaagattcaactgaaaaaggtatcaaagatgtgacagttacattgcaaaacgaaaaaggcgaagtaattggaacaactaaaacagatgaaaatggtaaatatcgtttcgataatttagatagcggtaaatacaaagttatttttgaaaagcctgctggcttaacacaaacagttacaaatacaactgaagatgataaagatgcagatggtggcgaagttgacgtaacaattacggatcatgatgatttcacacttgataacggatacttcgaagaagatacatcagacagcgattcagactcagatagtgactcagacagcgactcagactcagacagcgactcagactcagacagtgattcagattcagacagcgactcagattcagatagcgactcagattcggacagcgattcagactcagatagcgactcagattcagatagcgattcagactcagacagcgactcagattcagatagcgattcggactcagacagcgattcagactcagatagcgactcagactcagacagcgactcagattcagatagcgattcggactcagatagcgactcagattcagacagcgattcagactcagatagcgactcagattcagacagcgattcagactcagatagcgactcagactcagacagtgattcagattcagacagcgactcagactcagatagcgactcagattcggacagcgactcagactcagatagcgactcagactcagacagtgattcagacagcgattcagactcggatgcaggaaaacatacacctgttaaaccaatgagtactactaaagaccatcacaataaagcaaaagcattaccagaaacaggtagtgaaaataacggctcaaataacgcaacgttatttggtggattatttgcagcattaggttcattattgttattcggtcgtcgcaaaaaacaaaacaaa

SEQ ID NO: 146 - DNA, 372 bp, Staphylococcus aureus
atgactcatttattagagacatttgagatgtcaatagatcaccaggaagatggtttagttgttatttctatgcctgttactgataaagtaaaacaaccatttggatatttacatggtggggcttcgattgctttaggtgaaacagcatgttcattaggatctgctaatttaattgatacaaccaaatttattccattaggtttagagatgaatgctaaccatattcattctgctaaagatggtcgtgttactgcgacagctgaaattattcatcgaggtaagtcgacacatgtatgggatataaaaattaagaatgacaaagaacaattaattacagttatgcgtggtacagttgctattaaacctttaaaa

SEQ ID NO: 147 - DNA, 939 bp, Staphylococcus aureus
atggagcatacaactatgaaaataacaacgattgctaaaacaagtttagcactaggccttttaacaacaggtgtaatcacaacgacaacgcaagcagcaaacgcgacaacaccatcttccactaaagtggaagcaccacaatcaacaccgccctcaactaaaatagaagcaccgcaatcaaaaccaaacgcgacaacaccgccctcaactaaagtagaagcaccgcaacaaacagcaaatgcgacaacaccgccttcaactaaagtgacaacacctccatcaacaaacacgccacaaccaatgcaatctactaaatcagacacaccacaatcgccaaccacaaaacaagtaccaacagaaataaatcctaaatttaaagatttaagagcgtattatacgaaaccaagtttagaatttaaaaatgagattggtattattttaaaaaaatggacgacaataagatttatgaatgttgtcccagattatttcatatataaaattgctttagttggtaaagatgataaaaaatatggtgaaggagtacataggaatgtcgatgtatttgtcgttttagaagaaaataattacaatctggaaaaatattctgtcggtggtatcacaaagagtaatagtaaaaaagttgatcacaaagcaggagtaagaattactaaggaagataataaaggtacaatctctcatgatgtttcagaattcaagattactaaagaacagatttccttgaaagaacttgattttaaattgagaaaacaacttattgaaaaaaataatctgtacggtaacgttggttcaggtaaaattgttattaaaatgaaaaacggtggaaagtacacgtttgaattgcacaaaaaattacaagaaaatcgcatggcagatgtcattaatagtgaacaaattaaaaacatcgaagtgaatttgaaa

SEQ ID NO: 148 - DNA, 1908 bp, Staphylococcus aureus
atgaaaaagcaaataatttcgctaggcgcattagcagttgcatctagcttatttacatgggataacaaagcagatgcgatagtaacaaaggattatagtgggaaatcacaagttaatgctgggagtaaaaatgggacattaatagatagcagatatttaaattcagctctatattatttggaagactatataatttatgctataggattaactaataaatatgaatatggagataatatttataaagaagctaaagataggttgttggaaaaggtattaagggaagatcaatatcttttggagagaaagaaatctcaatatgaagattataaacaatggtatgcaaattataaaaaagaaaatcctcgtacagatttaaaaatggctaattttcataaatataatttagaagaactttcgatgaaagaatacaatgaactacaggatgcattaaagagagcactggatgattttcacagagaagttaaagatattaaggataagaattcagacttgaaaacttttaatgcagcagaagaagataaagcaactaaggaagtatacgatctcgtatctgaaattgatacattagttgtatcatattatggtgataaggattatggggagcacgcgaaagagttacgagcaaaactggacttaatccttggagatacagacaatccacataaaattacaaatgaacgtattaaaaaagaaatgattgatgacttaaattcaattattgatgatttctttatggaaactaaacaaaatagaccgaaatctataacgaaatataatcctacaacacataactataaaacaaatagtgataataaacctaattttgataaattagttgaagaaacgaaaaaagcagttaaagaagcagatgattcttggaaaaagaaaactgtcaaaaaatacggagaaactgaaacaaaatcgccagtagtaaaagaagagaagaaagttgaagaacctcaagcacctaaagttgataaccaacaagaggttaaaactacggctggtaaagctgaagaaacaacacaaccagttgcacaaccattagttaaaattccacagggcacaattacaggtgaaattgtaaaaggtccggaatatccaacgatggaaaataaaacggtacaaggtgaaatcgttcaaggtcccgattttctaacaatggaacaaagcggcccatcattaagcaataattatacaaacccaccgttaacgaaccctattttagaaggtcttgaaggtagctcatctaaacttgaaataaaaccacaaggtactgaatcaacgttaaaaggtactcaaggagaatcaagtgatattgaagttaaacctcaagcaactgaaacaacagaagcttctcaatatggtccgagaccgcaatttaacaaaacacctaaatatgttaaatatagagatgctggtacaggtatccgtgaatacaacgatggaacatttggatatgaagcgagaccaagattcaataagccatcagaaacaaatgcatataacgtaacaacacatgcaaatggtcaagtatcatacggagctcgtccgacatacaagaagccaagcgaaacgaatgcatacaatgtaacaacacatgcaaacggccaagtatcatacggagctcgtccgacacaaaacaagccaagcaaaacaaacgcatataacgtaacaacacatggaaacggccaagtatcatatggcgctcgcccaacacaaaacaagccaagcaaaacaaatgcatacaacgtaacaacacatgcaaacggtcaagtgtcatacggagctcgcccgacatacaagaagccaagtaaaacaaatgcatacaatgtaacaacacatgcagatggtactgcgacatatgggcctagagtaacaaaa

SEQ ID NO: 149 - DNA, 723 bp, Staphylococcus aureus
atgaaaaaattagcaacagtaggttctttaattgtaacaagcactttagtattctcaagtatgccttttcaaaatgcgcatgccgacacaacttcaatgaatgtgtcgaataaacaaagccaaaatgtacaaaatcatcgtccttatggcggagtagtaccacaaggaatgacgcaagcacaatatactgaattagagaaagctttaccccaattaagcgctggcagtaatatgcaagactataatatgaaattgtatgatgcgacgcaaaatattgctgataaatacaatgtgataattacaactaatgtaggggtatttaaaccacatgctgttagagatatgaatggccatgcgttacctttaacaaaagatggcaatttttatcaaacgaatgtagatgcaaatggtgttaatcatggtggtagtgaaatggtgcaaaataaaacaggtcatatgagtcaacaaggccatatgaatcagaacacacacatgaaccaacagccacacatgcaacaaggtcatatgcaatcatcaaaccatcaaatgatgagtccaaaagcaaatatgcattcatcaaatcatcaaatgaaccaaagtaacaaaaaagttttaccagctgctggtgaaagtatgacatcaagtattcttactgcaagtattgccgcactactattagtatctgggttattcttagcatttagacgacgttcaacaaataaa

SEQ ID NO: 150 - DNA, 1149 bp, Staphylococcus aureus
gtgcttaggagtgatttttatatgtcttattccattgttagagtttcaaaagttaaatctggaacaaatacaacgggcatacaaaaacatgttcaaagagaaaataataattatgaaaatgaagatatagaccatagtaaaacttacttaaattatgatttggtaaatgctaataaacagaattttaataacttgattgatgaaaaaatcgaacagaattatacaggcaaaagaaaaattagaacagacgcgattaaacacattgatggtttaattacatcagacaatgatttctttgataatcaaacgccagaagatacaaagcagttttttgaatatgctaaagagtttttagaacaagaatacggtaaagataatttattatatgcaacagttcacatggacgaaaaaacaccacatatgcattatggcgttgttccaataactgatgatggtcgtttaagtgctaaagaagttgtaggtaataaaaaagctttaacagcgtttcaagatagatttaatgagcatgttaaacaacgaggatatgatttagaacgtgggcaatcaagacaagtaacaaatgctaaacatgagcaaataagtcagtataaacaaaaaacagaatatcataagcaagaatatgaacgtgagagccaaaaaacagaccatataaagcaaaagaacgataaattaatgcaagagtaccaaaaatcgttaaatacgcttaaaaagcctataaatgttccgtatgagcaagaaactgaaaaagtaggtggtttatttagcaaagaaatacaagaaactggaaatgttgtaataagccaaaaagatttcaatgaatttcagaaacagataaaagctgctcaagatatttcggaagattacgagtatataaagtctggtagagccttagatgataaagataaggaaatacgagagaaagatgatttattaaataaagcagttgagcgtattgaaaacgcagacgataattttaaccaactttacgaaaatgcaaagccacttaaagagaatatagaaatagcgttaaagcttttaaaaatcttactaaaagagttagaacgagttttaggaagaaatacctttgcggaaagagttaataagttaacagaagatgaacctatggca

SEQ ID NO: 151 - protein, 1274 aa, Staphylococcus aureus
MSWFDKLFGEDNDSNDDLIHRKKKRRQESQNIDNDHDSLLPQNNDIYSRPRGKFRFPMSVAYENENVEQSADTISDEKEQYHRDYRKQSHDSRSQKRHRRRRNQTTEEQNYSEQRGNSKISQQSIKYKDHSHYHTNKPGTYVSAINGIEKETHKPKTHNMYSNNTNHRAKDSTPDYHKESFKTSEVPSAIFGTMKPKKLENGRIPVSKPSEKVESDKQKYDKYVAKTQTSQNKQLEQEKQNDSVVKQGTASKSSDENVSSTTKSMPNYSKVDNTIKIENIYASQIVEEIRRERERKVLQKRRFKKALQQKREEHKNEEQDAIQRAIDEMYAKQAERYVGDSSLNDDSDLTDNSTDASQLHTNGIENETVSNDENKQASIQNEDTNDTHVDESPYNYEEVSLNQVSTTKQLSDDEVTVSNVTSQHQSALQHNVEVNDKDELKNQSRLIADSEEDGATNKEEYSGSQIDDAEFYELNDTEVDEDTTSNIEDNTNRNASEMHVDAPKTQEYAVTESQVNNIDKTVDNEIELAPRHKKDDQTNLSVNSLKTNDVNDNHVVEDSSMNEIEKNNAEITENVQNEAAESEQNVEEKTIENVNPKKQTEKVSTLSKRPFNVVMTPSDKKRMMDRKKHSKVNVPELKPVQSKQAVSERMPASQATPSSRSDSQESNTNAYKTNNMTSNNVENNQLIGHAETENDYQNAQQYSEQKPSVDSTQTEIFEESQDDNQLENEQVDQSTSSSVSEVSDITEESEETTHPNNTSGQQDNDDQQKDLQSSFSNKNEDTANENRPRTNQQDVATNQAVQTSKPMIRKGPNIKLPSVSLLEEPQVIESDEDWITDKKKELNDALFYFNVPAEVQDVTEGPSVTRFELSVEKGVKVSRITALQDDIKMALAAKDIRIEAPIPGTSRVGIEVPNQNPTTVNLRSIIESPSFKNAESKLTVAMGYRINNEPLLMDIAKTPHALIAGATGSGKSVCINSILMSLLYKNHPEELRLLLIDPKMVELAPYNGLPHLVAPVITDVKAATQSLKWAVEEMERRYKLFAHYHVRNITAFNKKAPYDERMPKIVIVIDELADLMMMAPQEVEQSIARIAQKARACGIHMLVATQRPSVNVITGLIKANIPTRIAFMVSSSVDSRTILDSGGAERLLGYGDMLYLGSGMNKPIRVQGTFVSDDEIDDVVDFIKQQREPDYLFEEKELLKKTQTQSQDELFDDVCAFMVNEGHISTSLIQRHFQIGYNRAARIIDQLEQLGYVSSANGSKPRDVYVTEADLNKE

SEQ ID NO: 152 - protein, 1057 aa, Staphylococcus aureus
MPKRNDIKTILVIGSGPIIIGQAAEFDYAGTQACLALKEEGYRVILVNSNPATIMTDKEIADKVYIEPLTHDFIARIIRKEQPDALLPTLGGQTGLNMAIQLHESGVLQDNNVQLLGTELTSIQQAEDREMFRTLMNDLNVPVPESDIVNTVEQAFKFKEQVGYPLIVRPAFTMGGTGGGICHNDEELHEIVSNGLHYSPATQCLLEKSIAGFKEIEYEVMRDKNDNAIVVCNMENIDPVGIHTGDSIVVAPSQTLSDVEYQMLRDVSLKVIRALGIEGGCNVQLALDPHSFDYYIIEVNPRVSRSSALASKATGYPIAKLAAKIAVGLTLDEMLNPITGTSYAAFEPTLDYVISKIPRFPFDKFEKGERELGTQMKATGEVMAIGRTYEESLLKAIRSLEYGVHHLGLPNGESFDLDYIKERISHQDDERLFFIGEAIRRGTTLEEIHNMTQIDYFFLHKFQNIIDIEHQLKEHQGDLEYLKYAKDYGFSDKTIAHRFNMTEEEVYQLRMENDIKPVYKMVDTCAAEFESSTPYYYGTYETENESIVTDKEKILVLGSGPIRIGQGVEFDYATVHAVWAIQKAGYEAIIVNNNPETVSTDFSISDKLYFEPLTEEDVMNIINLEKPKGVVVQFGGQTAINLADKLAKHGVKILGTSLENLNRAEDRKEFEALLRKINVPQPQGKTATSPEEALANAAEIGYPVVVRPSYVLGGRAMEIVDNDKELENYMTQAVKASPEHPVLVDRYLTGKEIEVDAICDGETVIIPGIMEHIERAGVHSGDSIAVYPPQTLTEDELATLEDYTIKLAKGLNIIGLINIQFVIAHDGVYVLEVNPRSSRTVPFLSKITDIPMAQLAMRAIIGEKLTDMGYQEGVQPYAEGVFVKAPVFSFNKLKNVDITLGPEMKSTGEVMGKDTTLEKALFKGLTGSGVEVKDHGTVLMTVSDKDKEEVVKLAQRLNEVGYKILATSGTANKLAEYDIPAEVVGKIGGENDLLTRIQNGDVQIVINTMTKGKEVERDGFQIRRTTVENGIPCLTSLDTANALTNVIESMTFTMRQM

SEQ ID NO: 153 - protein, 1166 aa, Staphylococcus aureus
MINRDNKKAITKKGMISNRLNKFSIRKYTVGTASILVGTTLIFGLGNQEAKAAENTSTENAKQDDATTSDNKEVVSETENNSTTENNSTNPIKKETNTDSQPEAKKESTSSSTQKQQNNVTATTETKPQNIEKENVKPSTDKTATEDTSVILEEKKAPNNTNNDVTTKPSTSEPSTSEIQTKPTTPQESTNIENSQPQPTPSKVDNQVTDATNPKEPVNVSKEELKKNPEKLKELVRNDSNTDHSTKPVATAPTSVAPKRVNAKMRFAVAQPAAVASNNVNDLIKVTKQTIKVGDGKDNVAAAHDGKDIEYDTEFTIDNKVKKGDTMTINYDKNVIPSDLTDKNDPIDITDPSGEVIAKGTFDKATKQITYTFTDYVDKYEDIKSRLTLYSYIDKKTVPNETSLNLTFATAGKETSQNVTVDYQDPMVHGDSNIQSIFTKLDEDKQTIEQQIYVNPLKKSATNTKVDIAGSQVDDYGNIKLGNGSTIIDQNTEIKVYKVNSDQQLPQSNRIYDFSQYEDVTSQFDNKKSFSNNVATLDFGDINSAYIIKVVSKYTPTSDGELDIAQGTSMRTTDKYGYYNYAGYSNFIVTSNDTGGGDGTVKPEEKLYKIGDYVWEDVDKDGVQGTDSKEKPMANVLVTLTYPDGTTKSVRTDANGHYEFGGLKDGETYTVKFETPTGYLPTKVNGTTDGEKDSNGSSVTVKINGKDDMSLDTGFYKEPKYNLGDYVWEDTNKDGIQDANEPGIKDVKVTLKDSTGKVIGTTTTDASGKYKFTDLDNGNYTVEFETPAGYTPTVKNTTADDKDSNGLTTTGVIKDADNMTLDRGFYKTPKYSLGDYVWYDSNKDGKQDSTEKGIKDVTVTLQNEKGEVIGTTKTDENGKYRFDNLDSGKYKVIFEKPAGLTQTVTNTTEDDKDADGGEVDVTITDHDDFTLDNGYFEEDTSDSDSDSDSDSDSDSDSDSDSDSDSDSDSDSDSDSDSDSDSDSDSDSDSDSDSDSDSDSDSDSDSDSDSDSDSDSDSDSDSDSDSDSDSDSDSDSDSDSDSDSDSDSDSDSDSDSDSDSDSDSDSDSDSDSDSDSDSDSDSDSDSDSDSDSDSDSDSDSDSDSDSDAGKHTPVKPMSTTKDHHNKAKALPETGSENNGSNNATLFGGLFAALGSLLLFGRRKKQNK

SEQ ID NO: 154 - protein, 124 aa, Staphylococcus aureus
MTHLLETFEMSIDHQEDGLVVISMPVTDKVKQPFGYLHGGASIALGETACSLGSANLIDTTKFIPLGLEMNANHIHSAKDGRVTATAEIIHRGKSTHVWDIKIKNDKEQLITVMRGTVAIKPLK

SEQ ID NO: 155 - protein, 313 aa, Staphylococcus aureus
MEHTTMKITTIAKTSLALGLLTTGVITTTTQAANATTPSSTKVEAPQSTPPSTKIEAPQSKPNATTPPSTKVEAPQQTANATTPPSTKVTTPPSTNTPQPMQSTKSDTPQSPTTKQVPTEINPKFKDLRAYYTKPSLEFKNEIGIILKKWTTIRFMNVVPDYFIYKIALVGKDDKKYGEGVHRNVDVFVVLEENNYNLEKYSVGGITKSNSKKVDHKAGVRITKEDNKGTISHDVSEFKITKEQISLKELDFKLRKQLIEKNNLYGNVGSGKIVIKMKNGGKYTFELHKKLQENRMADVINSEQIKNIEVNLK

SEQ ID NO: 156 - protein, 636 aa, Staphylococcus aureus
MKKQIISLGALAVASSLFTWDNKADAIVTKDYSGKSQVNAGSKNGTLIDSRYLNSALYYLEDYIIYAIGLTNKYEYGDNIYKEAKDRLLEKVLREDQYLLERKKSQYEDYKQWYANYKKENPRTDLKMANFHKYNLEELSMKEYNELQDALKRALDDFHREVKDIKDKNSDLKTFNAAEEDKATKEVYDLVSEIDTLVVSYYGDKDYGEHAKELRAKLDLILGDTDNPHKITNERIKKEMIDDLNSIIDDFFMETKQNRPKSITKYNPTTHNYKTNSDNKPNFDKLVEETKKAVKEADDSWKKKTVKKYGETETKSPVVKEEKKVEEPQAPKVDNQQEVKTTAGKAEETTQPVAQPLVKIPQGTITGEIVKGPEYPTMENKTVQGEIVQGPDFLTMEQSGPSLSNNYTNPPLTNPILEGLEGSSSKLEIKPQGTESTLKGTQGESSDIEVKPQATETTEASQYGPRPQFNKTPKYVKYRDAGTGIREYNDGTFGYEARPRFNKPSETNAYNVTTHANGQVSYGARPTYKKPSETNAYNVTTHANGQVSYGARPTQNKPSKTNAYNVTTHGNGQVSYGARPTQNKPSKTNAYNVTTHANGQVSYGARPTYKKPSKTNAYNVTTHADGTATYGPRVTK

SEQ ID NO: 157 - protein, 241 aa, Staphylococcus aureus
MKKLATVGSLIVTSTLVFSSMPFQNAHADTTSMNVSNKQSQNVQNHRPYGGVVPQGMTQAQYTELEKALPQLSAGSNMQDYNMKLYDATQNIADKYNVIITTNVGVFKPHAVRDMNGHALPLTKDGNFYQTNVDANGVNHGGSEMVQNKTGHMSQQGHMNQNTHMNQQPHMQQGHMQSSNHQMMSPKANMHSSNHQMNQSNKKVLPAAGESMTSSILTASIAALLLVSGLFLAFRRRSTNK

SEQ ID NO: 158 - protein, 383 aa, Staphylococcus aureus
VLRSDFYMSYSIVRVSKVKSGTNTTGIQKHVQRENNNYENEDIDHSKTYLNYDLVNANKQNFNNLIDEKIEQNYTGKRKIRTDAIKHIDGLITSDNDFFDNQTPEDTKQFFEYAKEFLEQEYGKDNLLYATVHMDEKTPHMHYGVVPITDDGRLSAKEVVGNKKALTAFQDRFNEHVKQRGYDLERGQSRQVTNAKHEQISQYKQKTEYHKQEYERESQKTDHIKQKNDKLMQEYQKSLNTLKKPINVPYEQETEKVGGLFSKEIQETGNVVISQKDFNEFQKQIKAAQDISEDYEYIKSGRALDDKDKEIREKDDLLNKAVERIENADDNFNQLYENAKPLKENIEIALKLLKILLKELERVLGRNTFAERVNKLTEDEPMA

SEQ ID NO: 159 - DNA, 2631 bp, Staphylococcus aureus
atgatgaaaaagttaaaagcgagtgaaattagacaaaaatatctagatttctttgttgaaaaaggacatatggttgaaccttctgcaccattagtgccaattgatgatgatacattattatggattaattcaggtgtagcaacattaaagaaatattttgatggacgtgaaacacctaaaaagccaagaattgtaaactctcaaaaagctattcgtacaaatgatattgaaaatgttggtttcacagcgcgtcaccatacattctttgaaatgttaggtaacttctcaattggtgattattttaaacaagaagcgattgaatttgcttgggaatttttaacgagtgataaatggatgggtatggagccagataaattgtacgttacgattcatccggaagatatggaagcatacaacatttggcataaagatattgggcttgaagaaagtcgtattattcgcattgaaggtaacttctgggatattggtgaagggccttcaggaccgaacactgagattttctatgatcgcggagaagcatatggacaagacgatccggcagaagaaatgtatccaggtggagaaaatgaacgctatcttgaagtatggaacttagtatttagtgaattcaatcataataaagatcatagttacacaccattacctaataaaaatattgatactggcatggggcttgagcgtatggcctcagtttctcaaaatgtacgtactaactatgaaacagatttatttatgcctataatgaatgaaatcgaaaaagtatcaggtaaacaatatttagtaaacaacgaacaagatgtggcatttaaagtaattgctgaccacattcgtacgattgcatttgcaatttctgatggtgcattacctgccaatgaaggtagagggtatgtattacgtcgattgttacgtcgtgccgttcgttttagtcaaacgttaggaatcaatgagccatttatgtacaaacttgttgatattgttgcagacattatggaaccatattatccaaatgttaaggaaaaagcagatttcattaagcgtgttataaagtctgaagaagaacgattccatgaaacattagaagatggtttagcgattttaaatgaattaattaaaaaagctaaagcgacaacaaatgaaattaatgggaaagatgcatttaaattgtatgatacgtatgggttcccaattgaattaactgaagaaatagcagtgcaagcaggattgaaagttgatatgacaacattcgagtcagaaatgcaacaacaacgtgatcgtgcacgtcaagcacgtcaaaattctcaatcaatgcaagttcaaagtgaagtattgaaaaatattacatctgcaagtacttttgttggttatgatactgcgacagctcaaacaacactaacacacttgatatacaatggtgaagaagtttcacaagttgaagcgggtgaaacagtatacttcatgttaacggaaacaccattttatgcaatcagtggtggacaagttgcggatacaggtattgtttataatgacaattttgaaattgctgttagtgaagtaaccaaagcaccaaatggtcaaaacttgcataaaggagtagtacaatttggccaagtaaatgttggcgctacagtgtctgctgaagtgaaccaaaatgatcgacgtgacattcaaaagaaccatagtgcaacacatttattacatgcagcgttgaaatcagtactgggtgatcatgttaaccaagctggttcactagtagaagcagatcgtttacgttttgatttctctcattttggtccaatgactaatgatgaaattgatcaagttgaacgcttagtaaatgaagaaatttggaaaggtattgacgttaacattcaagaaatggatattgcttcagctaaagaaatgggcgcaatggcattattcggtgaaaaatatggtgatgttgtgcgtgtagtaaatatggcaccattttcaattgaattatgtggtggtattcatgtccgcaatacttctgaaattggcttattcaaaatagtaagtgagtcaggtacaggagctggtgtgcgtcgtattgaagcattaacaggtaaagcagctttcttatatttagaagatattcaagagaaatttaatacgatgaaatcacagctgaaagtgaaatctgatgatcaagtagtcgataagttaacacaattacaagatgaagaaaaagcattattaaaacaattagagcaacgtgacaaagaaatcacatcacttaaaatgggtaatattgaagatcaagttgaagaaatcaatggctataaagtattggttactgaagtggatgtaccaaatgcgaaagcaattcgctcgacaatggacgattttaaatctaaactacaagatacaattatcattcttgcaagtaatgttgatgataaagtatcgatggttgcaactgtccctaaatctttaacaaataacgttaaagccggtgatcttatcaaacaaatggcaccaatcgttggtggtaaaggtggcggtcgtccagatatggctcaaggtggcggtacacaacctgaaaatatctcaaaatcattaagctttattaaagattacattaaaaatcta

SEQ ID NO: 160 - protein, 877 aa, Staphylococcus aureus
MMKKLKASEIRQKYLDFFVEKGHMVEPSAPLVPIDDDTLLWINSGVATLKKYFDGRETPKKPRIVNSQKAIRTNDIENVGFTARHHTFFEMLGNFSIGDYFKQEAIEFAWEFLTSDKWMGMEPDKLYVTIHPEDMEAYNIWHKDIGLEESRIIRIEGNFWDIGEGPSGPNTEIFYDRGEAYGQDDPAEEMYPGGENERYLEVWNLVFSEFNHNKDHSYTPLPNKNIDTGMGLERMASVSQNVRTNYETDLFMPIMNEIEKVSGKQYLVNNEQDVAFKVIADHIRTIAFAISDGALPANEGRGYVLRRLLRRAVRFSQTLGINEPFMYKLVDIVADIMEPYYPNVKEKADFIKRVIKSEEERFHETLEDGLAILNELIKKAKATTNEINGKDAFKLYDTYGFPIELTEEIAVQAGLKVDMTTFESEMQQQRDRARQARQNSQSMQVQSEVLKNITSASTFVGYDTATAQTTLTHLIYNGEEVSQVEAGETVYFMLTETPFYAISGGQVADTGIVYNDNFEIAVSEVTKAPNGQNLHKGVVQFGQVNVGATVSAEVNQNDRRDIQKNHSATHLLHAALKSVLGDHVNQAGSLVEADRLRFDFSHFGPMTNDEIDQVERLVNEEIWKGIDVNIQEMDIASAKEMGAMALFGEKYGDVVRVVNMAPFSIELCGGIHVRNTSEIGLFKIVSESGTGAGVRRIEALTGKAAFLYLEDIQEKFNTMKSQLKVKSDDQVVDKLTQLQDEEKALLKQLEQRDKEITSLKMGNIEDQVEEINGYKVLVTEVDVPNAKAIRSTMDDFKSKLQDTIIILASNVDDKVSMVATVPKSLTNNVKAGDLIKQMAPIVGGKGGGRPDMAQGGGTQPENISKSLSFIKDYIKNL

SEQ ID NO: 161 - DNA, 1722 bp, Staphylococcus aureus
atgaatagtgagtttatatatggacgggtaacaaatttaggaggtaagattttgagtttaataaagaaaaagaataaagatattcgcattataccattaggcggtgttggcgaaattgctaaaaatatgtatatcgttgaagtagacgatgaaatgtttatgttagatgctggacttatgtttccagaagacgaaatgctaggtattgatattgttataccagacatttcatacgtacttgaaaataaagataaattgaagggtatattccttacacacggacatgagcacgcgattggtgcagtgagttatgttttagaacaattagatgcaccagtatatggatctaaattgacaatagcgttaattaaagaaaatatgaaagcccgtaatattgataaaaaagttcgctactatacagttaataatgattcaattatgagattcaaaaacgtgaatattagtttctttaatacgacacacagtattcctgatagtttaggtgtttgtattcacacttcatatggtgccattgtgtatacaggtgaatttaagtttgaccaaagtttacatggacattatgcaccagatattaaacgtatggcagagattggtgaagaaggcgtatttgtcttaatcagtgattctactgaggcagagaaacctggatataatactccggaaaatgtgattgaacatcatatgtatgatgcttttgcaaaagtgcgaggtcgcttgatagtttcatgttatgcttcgaactttatacgtattcagcaagttttaaatattgctagcaagctaaatcgtaaagtgtcatttttaggaagatcacttgaaagttcatttaatattgctcgtaaaatggggtatttcgacattcctaaagatttgctaattcctataacagaagttgataattatcctaaaaatgaagtgataattatagctactggtatgcaaggagaacctgtagaagccttaagtcaaatggcgcaacataagcataaaattatgaatatcgaagaaggcgattctgtatttttagcaattacggcttctgctaatatggaagttatcattgcgaatacattaaatgagcttgtacgtgctggcgcacatattattccaaataacaaaaagattcatgcttcaagtcatggttgcatggaagaattaaaaatgatgattaatattatgaaacctgaatactttattcctgtacaaggtgaatttaaaatgcagatagcacatgcgaagctagcagctgaagcaggtgttgcaccagaaaagattttccttgtggaaaaaggagatgtcattaattacaacggtaaagatatgatattaaatgaaaaggtaaattcaggaaatattttaatagatggcattggtattggggatgtaggaaatatcgtgttgagagaccgtcatcttttagcagaagatggtatctttattgctgttgtaacgttagatcctaaaaatagacgtatagctgcgggacctgaaattcaatctcgtgggtttgtatatgtacgtgaaagtgaagacttattacgtgaagcagaagagaaagtacgtgaaatagtagaggctggtttacaagaaaaacgcatagaatggtctgaaattaaacaaaatatgcgtgatcaaattagtaaactattattcgaaagtacaaaacgtcgtcctatgattattccagtaatttctgaaatt

SEQ ID NO: 162 - protein, 574 aa, Staphylococcus aureus
MNSEFIYGRVTNLGGKILSLIKKKNKDIRIIPLGGVGEIAKNMYIVEVDDEMFMLDAGLMFPEDEMLGIDIVIPDISYVLENKDKLKGIFLTHGHEHAIGAVSYVLEQLDAPVYGSKLTIALIKENMKARNIDKKVRYYTVNNDSIMRFKNVNISFFNTTHSIPDSLGVCIHTSYGAIVYTGEFKFDQSLHGHYAPDIKRMAEIGEEGVFVLISDSTEAEKPGYNTPENVIEHHMYDAFAKVRGRLIVSCYASNFIRIQQVLNIASKLNRKVSFLGRSLESSFNIARKMGYFDIPKDLLIPITEVDNYPKNEVIIIATGMQGEPVEALSQMAQHKHKIMNIEEGDSVFLAITASANMEVIIANTLNELVRAGAHIIPNNKKIHASSHGCMEELKMMINIMKPEYFIPVQGEFKMQIAHAKLAAEAGVAPEKIFLVEKGDVINYNGKDMILNEKVNSGNILIDGIGIGDVGNIVLRDRHLLAEDGIFIAVVTLDPKNRRIAAGPEIQSRGFVYVRESEDLLREAEEKVREIVEAGLQEKRIEWSEIKQNMRDQISKLLFESTKRRPMIIPVISEI

SEQ ID NO: 163 - DNA, 1272 bp, Staphylococcus aureus
atggaaataacaatgcctaagttaggtgagagtgttcatgaaggcaccattgaacaatggttagtttctgttggtgatcatattgatgaatatgaaccattatgtgaagttattacagataaagtgacagctgaagtcccttccacgatatcaggaacaattacagaaattttagttgaagcggggcagacagtagctattgatacaattatctgtaaaattgaaactgctgatgaaaagacaaatgaaacaactgaagagatacaagcaaaagtggatgagcatactcagaaatctactaaaaaagctagtgcaacagtggaacagacatctactgctaaacaaaatcaaccacgtaataatggtcgcttttcacctgttgtatttaaactcgcttcagagcatgacattgatttatcacaagttgtaggtagtggatttgaaggtcgtgtaactaagaaggatataatgtcagttattgaaaatggtggtaccacagctcaatctgacaaacaagttcaaacaaaatcaacatcagtagatacatcaagtaaccaatcatctgaagacaatagtgaaaacagcacaataccagtaaatggtgtgcgtaaagcaattgcgcaaaatatggttaatagtgtaacagagattccacatgcatggatgatgattgaagtagatgctacaaatcttgtgaaaacgagaaatcattataaaaacagctttaaaaataaagaaggatataatctaacgttctttgctttctttgtaaaagctgtagcagatgctttaaaagcatatcctttattaaatagtagctggcaaggaaatgaaattgtcttacataaagacattaatatttcaattgctgttgctgatgaaaataaattatacgtacctgtgattaagcatgcagacgaaaagtcaatcaaaggtatagctagagaaattaatactttagcaacgaaagcgcgtaataagcaattgacagctgaagatatgcagggcggtacatttacggtaaataatactggtacatttggttcagtatcatcaatgggtattataaatcatccacaagcagcgattttacaagtagaatcaatcgttaaaaagccagtagtaattaatgatatgattgcaattcgtaacatggttaatttatgtatttcaattgatcatcgtattttagatggtttacaaacaggtaaatttatgaatcatattaaacagcgtatcgaacagtatactttagaaaatacaaatatatat

SEQ ID NO: 164 - protein, 424 aa, Artificial Sequence
  Description of Artificial Sequence:  Synthetic Peptide
MEITMPKLGESVHEGTIEQWLVSVGDHIDEYEPLCEVITDKVTAEVPSTISGTITEILVEAGQTVAIDTIICKIETADEKTNETTEEIQAKVDEHTQKSTKKASATVEQTSTAKQNQPRNNGRFSPVVFKLASEHDIDLSQVVGSGFEGRVTKKDIMSVIENGGTTAQSDKQVQTKSTSVDTSSNQSSEDNSENSTIPVNGVRKAIAQNMVNSVTEIPHAWMMIEVDATNLVKTRNHYKNSFKNKEGYNLTFFAFFVKAVADALKAYPLLNSSWQGNEIVLHKDINISIAVADENKLYVPVIKHADEKSIKGIAREINTLATKARNKQLTAEDMQGGTFTVNNTGTFGSVSSMGIINHPQAAILQVESIVKKPVVINDMIAIRNMVNLCISIDHRILDGLQTGKFMNHIKQRIEQYTLENTNIY

SEQ ID NO: 165 - DNA, 1938 bp, Staphylococcus aureus; identical to SEQ ID NO: 1

SEQ ID NO: 166 - DNA, 939 bp, Staphylococcus aureus; identical to SEQ ID NO: 2

SEQ ID NO: 167 - DNA, 726 bp, Staphylococcus aureus
atggaggacaacatgatttatgcaggtattttagcaggaggtattggttcgagaatggggaacgtgccattaccaaaacaatttttagatattgataataaaccgattttaatccatacaattgagaagttcattttagtgagtgaatttaatgagattattatcgcaacgccagcacagtggatttcccatacacaggatattttaaaaaaatataacattacagatcaacgtgtcaaagtagttgcaggtggtacggatcgaaatgaaacaattatgaacattatcgaccatattcgcaatgtaaatggaattaataatgatgatgtgattgtaactcatgatgccgtaagaccatttttaactcaacgtattattaaagagaacattgaagtagcagcaaaatatggtgcagtagatacagtcattgaagcaattgatacgattgtaatgtctaaagataaacagaacatacacagtatccctgtaaggaatgaaatgtatcaaggccaaacaccacaatcatttaatattaaattattacaagatagttatcgcgccttaagtagtgaacaaaaagaaatcttatcagatgcatgtaaaatcattgtcgaatctggacatgcagttaaattggtacgtggagaactatacaacattaaagtgacaacaccgtatgatttaaaagtagcaaatgccattattcaaggtgatattgccgatgat

SEQ ID NO: 168 - protein, 242 aa, Staphylococcus aureus
MEDNMIYAGILAGGIGSRMGNVPLPKQFLDIDNKPILIHTIEKFILVSEFNEIIIATPAQWISHTQDILKKYNITDQRVKVVAGGTDRNETIMNIIDHIRNVNGINNDDVIVTHDAVRPFLTQRIIKENIEVAAKYGAVDTVIEAIDTIVMSKDKQNIHSIPVRNEMYQGQTPQSFNIKLLQDSYRALSSEQKEILSDACKIIVESGHAVKLVRGELYNIKVTTPYDLKVANAIIQGDIADD

SEQ ID NO: 169 - DNA, 2358 bp, Staphylococcus aureus
atgataatatattggtgtatgacagttaatggagggaacgaaatgaaagctttattacttaaaacaagtgtatggctcgttttgctttttagtgtaatgggattatggcaagtctcgaacgcggctgagcagcatacaccaatgaaagcacatgcagtaacaacgatagacaaagcaacaacagataagcaacaagtaccgccaacaaaggaagcggctcatcattctggcaaagaagcggcaaccaacgtatcagcatcagcgcagggaacagctgatgatacaaacagcaaagtaacatccaacgcaccatctaacaaaccatctacagtagtttcaacaaaagtaaacgaaacacgcgacgtagatacacaacaagcctcaacacaaaaaccaactcacacagcaacgttcaaattatcaaatgctaaaacagcatcactttcaccacgaatgtttgctgctaatgcaccacaaacaacaacacataaaatattacatacaaatgatatccatggccgactagccgaagaaaaagggcgtgtcatcggtatggctaaattaaaaacagtaaaagaacaagaaaagcctgatttaatgttagacgcaggagacgccttccaaggtttaccactttcaaaccagtctaaaggtgaagaaatggctaaagcaatgaatgcagtaggttatgatgctatggcagtcggtaaccatgaatttgactttggatacgatcagttgaaaaagttagagggtatgttagacttcccgatgctaagtactaacgtttataaagatggaaaacgcgcgtttaagccttcaacgattgtaacaaaaaatggtattcgttatggaattattggtgtaacgacaccagaaacaaagacgaaaacaagacctgaaggcattaaaggcgttgaatttagagatccattacaaagtgtgacagcggaaatgatgcgtatttataaagacgtagatacatttgttgttatatcacatttaggaattgatccttcaacacaagaaacatggcgtggtgattacttagtgaaacaattaagtcaaaatccacaattgaagaaacgtattacagttattgatggtcattcacatacagtacttcaaaatggtcaaatttataacaatgatgcattggcacaaacaggtacagcacttgcgaatatcggtaagattacatttaattatcgcaatggagaggtatcgaatattaaaccgtcattgattaatgttaaagacgttgaaaatgtaacaccgaacaaagcattagctgaacaaattaatcaagctgatcaaacatttagagcacaaactgcagaggtaattattccaaacaataccattgatttcaaaggagaaagagatgacgttagaacgcgtgaaacaaatttaggaaacgcgattgcagatgctatggaagcgtatggcgttaagaatttctctaaaaagactgactttgccgtgacaaatggtggaggtattcgtgcctctatcgcaaaaggtaaggtgacacgctatgatttaatctcagtattaccatttggaaatacgattgcgcaaattgatgtaaaaggttcagacgtctggacggctttcgaacatagtttaggcgcaccaacaacacaaaaggacggtaagacagtgttaacagcgaatggcggtttactacatatctctgattcaatccgtgtttactatgatataaataaaccgtctggcaaacgaattaatgctattcaaattttaaataaagagacaggtaagtttgaaaatattgatttaaaacgtgtatatcacgtaacgatgaatgacttcacagcatcaggtggcgacggatatagtatgttcggtggtcctagagaagaaggtatttcattagatcaagtactagcaagttatttaaaaacagctaacttagctaagtatgatacgacagaaccacaacgtatgttattaggtaaaccagcagtaagtgaacaaccagctaaaggacaacaaggtagcaaaggtagtaagtctggtaaagatacacaaccaattggtgacgacaaagtgatggatccagcgaaaaaaccagctccaggtaaagttgtattgttgctagcgcatagaggaactgttagtagcggtacagaaggttctggtcgcacaatagaaggagctactgtatcaagcaagagtgggaaacaattggctagaatgtcagtgcctaaaggtagcgcgcatgagaaacagttaccaaaaactggaactaatcaaagttcaagcccagaagcgatgtttgtattattagcaggtataggtttaatcgcgactgtacgacgtagaaaagctagc

SEQ ID NO: 170 - protein, 786 aa, Staphylococcus aureus
MIIYWCMTVNGGNEMKALLLKTSVWLVLLFSVMGLWQVSNAAEQHTPMKAHAVTTIDKATTDKQQVPPTKEAAHHSGKEAATNVSASAQGTADDTNSKVTSNAPSNKPSTVVSTKVNETRDVDTQQASTQKPTHTATFKLSNAKTASLSPRMFAANAPQTTTHKILHTNDIHGRLAEEKGRVIGMAKLKTVKEQEKPDLMLDAGDAFQGLPLSNQSKGEEMAKAMNAVGYDAMAVGNHEFDFGYDQLKKLEGMLDFPMLSTNVYKDGKRAFKPSTIVTKNGIRYGIIGVTTPETKTKTRPEGIKGVEFRDPLQSVTAEMMRIYKDVDTFVVISHLGIDPSTQETWRGDYLVKQLSQNPQLKKRITVIDGHSHTVLQNGQIYNNDALAQTGTALANIGKITFNYRNGEVSNIKPSLINVKDVENVTPNKALAEQINQADQTFRAQTAEVIIPNNTIDFKGERDDVRTRETNLGNAIADAMEAYGVKNFSKKTDFAVTNGGGIRASIAKGKVTRYDLISVLPFGNTIAQIDVKGSDVWTAFEHSLGAPTTQKDGKTVLTANGGLLHISDSIRVYYDINKPSGKRINAIQILNKETGKFENIDLKRVYHVTMNDFTASGGDGYSMFGGPREEGISLDQVLASYLKTANLAKYDTTEPQRMLLGKPAVSEQPAKGQQGSKGSKSGKDTQPIGDDKVMDPAKKPAPGKVVLLLAHRGTVSSGTEGSGRTIEGATVSSKSGKQLARMSVPKGSAHEKQLPKTGTNQSSSPEAMFVLLAGIGLIATVRRRKAS

SEQ ID NO: 171 - DNA, 567 bp, Staphylococcus aureus
atgcaagagtaccaaaaatcgttaaatacgcttaaaaagcctataaatgttccgtatgagcaagaaactgaaaaagtaggtggtttatttagcaaagaaatacaagaaactggaaatgttgtaataagccaaaaagatttcaatgaatttcagaaacagataaaagctgctcaagatatttcggaagattacgagtatataaagtctggtagagccttagatgataaagataaggaaatacgagagaaagatgatttattaaataaagcagttgagcgtattgaaaacgcagacgataattttaaccaactttacgaaaatgcaaagccacttaaagagaatatagaaatagcgttaaagcttttaaaaatcttactaaaagagttagaacgagttttaggaagaaatacctttgcggaaagagttaataagttaacagaagatgaaccaaaactaaatggtttagcaggaaacttagataaaaaaatgaatccagaattatattcagaacaggaacagcaacaagaacaacaaaagaatcaaaaacgagatagaggtatgcactta

SEQ ID NO: 172 - protein, 189 aa, Staphylococcus aureus
MQEYQKSLNTLKKPINVPYEQETEKVGGLFSKEIQETGNVVISQKDFNEFQKQIKAAQDISEDYEYIKSGRALDDKDKEIREKDDLLNKAVERIENADDNFNQLYENAKPLKENIEIALKLLKILLKELERVLGRNTFAERVNKLTEDEPKLNGLAGNLDKKMNPELYSEQEQQQEQQKNQKRDRGMHL

SEQ ID NO: 173 - DNA, 960 bp, Staphylococcus aureus
atgaagatgataaacaaattaatcgttccggtaacagctagtgctttattattaggcgcttgtggcgctagtgccacagactctaaagaaaatacattaatttcttctaaagctggagacgtaacagttgcagatacaatgaaaaaaatcggtaaagatcaaattgcaaatgcatcatttactgaaatgttaaataaaattttagctgataaatataaaaataaagttaatgataagaagattgacgaacaaattgaaaaaatgcaaaagcaatacggcggtaaagataaatttgaaaaggcccttcaacagcaaggtttaacagccgataaatataaagaaaatttacgtactgctgcttatcataaagaattactatcagataaaattaaaatctctgattctgaaattaaagaagacagcaagaaagcttcacacattttaattaaagttaaatctaagaaaagcgacaaagaaggcttagatgataaagaagcgaaacaaaaagctgaagaaattcaaaaagaagtttcaaaagatccaagtaaatttggtgaaatcgctaaaaaagaatcaatggatactggttcagctaaaaaagatggcgaattaggttatgttcttaaaggacaaactgataaagattttgaaaaagcactatttaagcttaaagatggtgaagtatcagaggttgttaaatcaagctttggatatcatattattaaagctgataaaccaacagactttaacagtgaaaaacaaagcctgaaagaaaaattagtcgatcagaaagtacaaaaaaatccaaaattattgactgatgcatacaaagatctattaaaagaatacgatgttgactttaaagatcgtgatattaaatcagttgtcgaagataaaatcttaaaccctgaaaaacttaaacaaggtggcgcacaaggcggacaatccggcatgagccaa

SEQ ID NO: 174 - protein, 320 aa, Staphylococcus aureus
MKMINKLIVPVTASALLLGACGASATDSKENTLISSKAGDVTVADTMKKIGKDQIANASFTEMLNKILADKYKNKVNDKKIDEQIEKMQKQYGGKDKFEKALQQQGLTADKYKENLRTAAYHKELLSDKIKISDSEIKEDSKKASHILIKVKSKKSDKEGLDDKEAKQKAEEIQKEVSKDPSKFGEIAKKESMDTGSAKKDGELGYVLKGQTDKDFEKALFKLKDGEVSEVVKSSFGYHIIKADKPTDFNSEKQSLKEKLVDQKVQKNPKLLTDAYKDLLKEYDVDFKDRDIKSVVEDKILNPEKLKQGGAQGGQSGMSQ

SEQ ID NO: 175 - DNA, 744 bp, Staphylococcus aureus
atgcttttagtattagctggttgctctaattctaacgataataatgaaagtaaaaaagatgacgcagacaatggtaagaaacaagagattcaagttgcagcggcagcaagtttaacagatgtaaccaagaaattagcttcagaatttaaaaaagagcataaaaatgctgatattaaatttaactatggtggatcaggggcattaagaaaacaaattgaatcaggcgcacctgttgacgtatttatgtctgcaaatactaaagatgtagatgcattaaaagacaagaataaagcgcatgatacatataaatatgcgaaaaatagtctagtattaattggtgataaagattcaaattacacttcagtaaaagacttaaaagacaatgataaattagcattaggtgaagtgaaaactgtaccagcaggaaaatatgcgaaacagtatttagataacaataacttatttaaagaagtcgaaagtaaaatcgtttatgctaaagatgtaaaacaagtattaaattatgttgaaaagggtaatgcgaaacaaggttttgtgtataaaactgacttatataaacaaaataaaaaaattgatactgtaaaagtaattaaagaagtagaacttaagaagccaatcacatacgaagctggtgctacatcagatagtaaattagcaaaagagtggatggaattcttaaaatcagataaagctaaagaaatactaaaagaataccactttgcagca

SEQ ID NO: 176 - protein, 248 aa, Staphylococcus aureus
MLLVLAGCSNSNDNNESKKDDADNGKKQEIQVAAAASLTDVTKKLASEFKKEHKNADIKFNYGGSGALRKQIESGAPVDVFMSANTKDVDALKDKNKAHDTYKYAKNSLVLIGDKDSNYTSVKDLKDNDKLALGEVKTVPAGKYAKQYLDNNNLFKEVESKIVYAKDVKQVLNYVEKGNAKQGFVYKTDLYKQNKKIDTVKVIKEVELKKPITYEAGATSDSKLAKEWMEFLKSDKAKEILKEYHFAA

SEQ ID NO: 177 - DNA, 738 bp, Staphylococcus aureus
ttggcatacacatacactttaaaagatattattgaaattacaggtgtaactaaaagaactttacattattacgatgaaataggattattagttccagataaaaatgataaaaattatcgcgtttataaacagcaagacttagaaaaattacaaaagattttaatactcaagtcttttgattttgatatcgctaaaataaaacaatacatttcgtatgataatgaacaattgcgaaagttattatcagagcaaataagcaagttagataaaaagatttctgacttacaattaattagacgctctgtatgtgaatttattaaaggactctctctaatagataccagcattttaaacaagacactacagtcacaatatgataaagaagcatctataaaatatggtcatacgaaagcatatcaatcatttattagacgtaaagacagcttacaatcgcaggatatcagacataaattgacaactatcttcaataaatttaatcatatgtctttgagtcattatccaatccaagattgtagtgatctcgtatttgagtggaaggcatttatgaacactatcgctgattttgatgatgaaacattatgctgtattgctaaaacatatgaagatgatacgcgtttcaaagattactttaattcatatgataatcaaaatttagcatcatacatttcagaagctgttaattattttttgagcaatgtgaataagagcgacaatttt

SEQ ID NO: 178 - protein, 246 aa, Staphylococcus aureus
MAYTYTLKDIIEITGVTKRTLHYYDEIGLLVPDKNDKNYRVYKQQDLEKLQKILILKSFDFDIAKIKQYISYDNEQLRKLLSEQISKLDKKISDLQLIRRSVCEFIKGLSLIDTSILNKTLQSQYDKEASIKYGHTKAYQSFIRRKDSLQSQDIRHKLTTIFNKFNHMSLSHYPIQDCSDLVFEWKAFMNTIADFDDETLCCIAKTYEDDTRFKDYFNSYDNQNLASYISEAVNYFLSNVNKSDNF

SEQ ID NO: 179 - DNA, 1737 bp, Staphylococcus aureus
atggcaaaaataaaagcaaatgaagcattagttaaagcattacaagcatgggatatagatcacttgtatggtattccaggagactcaatcgacgcagtagtcgatagtttacgtacagtgagagatcaatttaaattttatcatgtacgtcatgaagaagtagcaagcttagcggctgctggttacacaaaattaactggtaaaatcggtgtggcattaagtatcggtggccctggtttaattcatttattaaatggtatgtatgatgccaaaatggataatgtaccgcaattaatattatctggacaaacgaatagtacagcacttggaacgaaagcattccaagaaacaaatttacaaaaattatgtgaagatgtagccgtttataatcaccaaattgaaaaaggtgacaatgtgtttgaaatcgttaacgaagcaattcgtacggcatatgaacaaaaaggtgtagctgttgttatttgtcctaacgacttattaactgaaaaaattaaagatacaacgaataaaccagtagatacatcaagaccaacagtagtatcaccaaaatataaagacatcaaaaaagcggttaaactaattaataaaagtaaaaagcctgtcatgttaattggtgtaggtgcgaaacatgcgaaagatgagctacgtgaatttattgaaatggctaaaattcctgtcattcattcattaccagctaaaacaatcttgccggatgatcatccatatagtatcggtaacttaggtaaaatcggtaccaaaacatcttatcaaacaatgcaggaagcggatttattaattatggttggtacaaactatccatatgtggattacttacctaagaaaaatattaaagccattcaaattgacacaaatcctaaaaatatcggacatcgtttcaatattaatgtaggaattgttggagatagtaaaattgcgttgcatcagttaactgaaaatattaaacatgttgctgaaagaccattcttaaacaaaacgttagaacgtaaagcggtttgggataaatggatggaacaagataaaaataataatagtaaaccattacgtccagaacgattaatggcatcaatcaataaatttattaaagatgatgcagtgatttcagcagatgtaggtacagcaacagtttggtcaactcgatacttaaaccttggtgtaaataacaagttcatcatttcaagttggttaggtacaatgggttgcggtcttccaggtgcaattgcatcaaaaattgcatatccaaatagacaagccatcgcaattgctggtgacggtgcattccaaatggtaatgcaagacttcgctacagcagtacaatatgatttacctttaactgtatttgtacttaataacaaacagttagcatttattaaatatgaacaacaagcagctggtgaattagaatatgcagttgatttttctgatatggatcatgcaaaatttgctgaggcagcaggtggtaaaggttatacaattaagagtgctagcgaagtagatgctatagtcgaagaggcattagcacaagatgtaccaacgattgtagatgtatatgttgatcctaatgctgcgccattaccaggtaaaattgtaaatgaagaagcgcttggttatggtaagtgggcatttagatcaattactgaagataaacatttagatttagatcaaattccaccaatttcagtggcagcaaaacgtttctta

SEQ ID NO: 180 - protein, 579 aa, Staphylococcus aureus
MAKIKANEALVKALQAWDIDHLYGIPGDSIDAVVDSLRTVRDQFKFYHVRHEEVASLAAAGYTKLTGKIGVALSIGGPGLIHLLNGMYDAKMDNVPQLILSGQTNSTALGTKAFQETNLQKLCEDVAVYNHQIEKGDNVFEIVNEAIRTAYEQKGVAVVICPNDLLTEKIKDTTNKPVDTSRPTVVSPKYKDIKKAVKLINKSKKPVMLIGVGAKHAKDELREFIEMAKIPVIHSLPAKTILPDDHPYSIGNLGKIGTKTSYQTMQEADLLIMVGTNYPYVDYLPKKNIKAIQIDTNPKNIGHRFNINVGIVGDSKIALHQLTENIKHVAERPFLNKTLERKAVWDKWMEQDKNNNSKPLRPERLMASINKFIKDDAVISADVGTATVWSTRYLNLGVNNKFIISSWLGTMGCGLPGAIASKIAYPNRQAIAIAGDGAFQMVMQDFATAVQYDLPLTVFVLNNKQLAFIKYEQQAAGELEYAVDFSDMDHAKFAEAAGGKGYTIKSASEVDAIVEEALAQDVPTIVDVYVDPNAAPLPGKIVNEEALGYGKWAFRSITEDKHLDLDQIPPISVAAKRFL

SEQ ID NO: 181 - DNA, 26 bp, Staphylococcus aureus
gtagtagtttagggcttgcaacgcac

SEQ ID NO: 182 - DNA, 28 bp, Staphylococcus aureus
caccatcatagaacatacaattgctagc

SEQ ID NO: 183 - DNA, 22 bp, Staphylococcus aureus
ctgatactggacaacatagaga

SEQ ID NO: 184 - DNA, 24 bp, Staphylococcus aureus
aagtaacgttatctttcgaatggt

SEQ ID NO: 185 - DNA, 27 bp, Staphylococcus aureus
atttctggcactcaagtatatcaagac

SEQ ID NO: 186 - DNA, 22 bp, Staphylococcus aureus
tggcttaggtgttggtgtaggc

SEQ ID NO: 187 - DNA, 22 bp, Staphylococcus aureus
ataatgcaactacaactcagcc

SEQ ID NO: 188 - DNA, 27 bp, Staphylococcus aureus
ttgatcgttgatgtattttgattagat

SEQ ID NO: 189 - DNA, 23 bp, Staphylococcus aureus
ctacaataactacagccgttaca

SEQ ID NO: 190 - DNA, 23 bp, Staphylococcus aureus
gtgaatgaagttataaccagcag

SEQ ID NO: 191 - DNA, 23 bp, Staphylococcus aureus
cacgctaaagcatcagtgacaga

SEQ ID NO: 192 - DNA, 27 bp, Staphylococcus aureus
agcattttgatgtgttgctgttgtgtt

SEQ ID NO: 193 - DNA, 20 bp, Staphylococcus aureus
gaatccccaagcacctaaac

SEQ ID NO: 194 - DNA, 22 bp, Staphylococcus aureus
gtaaacgttgatcaagcacact

SEQ ID NO: 195 - DNA, 28 bp, Staphylococcus aureus
tttgcaataacagcaacatctggtgcag

SEQ ID NO: 196 - DNA, 27 bp, Staphylococcus aureus
gaaacttctgaagctggaattgtacgg

SEQ ID NO: 197 - DNA, 1755 bp, Staphylococcus aureus
atgagaaaaactaaaattgtatgtacaattggaccagcttcagaatcagaagaaatgattgagaaattaatcaatgctggtatgaacgttgcacgattaaacttttcacatggtagtcatgaagagcataaaggtagaattgatacaattcgtaaagtagctaaaagattagacaaaattgtagcaattttattagatacaaaaggtccagaaattcgtacgcataatatgaaagacggtatcattgaacttgaacgtggcaacgaagttattgttagcatgaatgaagttgaaggaacacctgaaaagttctcagtaacatatgaaaacttaattaacgatgttcaagtaggttcatacattttacttgatgatggcttaattgaattacaagttaaagatattgaccatgctaaaaaagaagttaaatgtgatattttaaactctggtgagcttaaaaacaaaaaaggtgttaacttacctggcgtaagagtaagtttacctggtattacagaaaaagatgctgaagatatccgtttcggtattaaagaaaatgttgacttcattgcagcaagtttcgtacgtcgtcctagtgatgttttagaaattcgtgaaattttagaagaacaaaaagctaacatttcagtattccctaaaattgaaaaccaagaaggtattgataatattgcggaaattcttgaagtgtctgatggtttaatggttgcacgtggtgacatgggtgttgaaattccacctgaaaaagtaccaatggttcaaaaagatttaatcagacaatgtaacaaattaggtaaaccagttattacagctacacaaatgttagattctatgcaacgtaacccacgtgctacacgtgcagaagctagtgacgttgccaacgcaatctatgatggtacagatgcagtaatgttatctggtgaaactgctgctggtttatatcctgaagaagctgttaaaacaatgagaaatattgctgtatcagctgaagcagcccaagattacaaaaagttattgtcagatcgtactaaattagttgaaacttcattagtgaatgctatcggtatttcggttgcacatacagctttaaacttaaatgttaaagcaattgtagctgctactgaaagtggttcaacggcacgtactatctccaaatatcgtccacattcagacattattgcggtgactccaagtgaagaaactgcacgtcaatgttcaattgtttggggagttcaacctgtagttaaaaaaggacgtaagagtacagatgcattgttaaacaatgcagttgcaacagctgttgaaactggtagagtatctaatggtgatttaatcattattactgctggtgtaccaactggtgaaactggaactactaatatgatgaaaatccacctagttggtgacgaaattgctaatggtcaaggtattggacgtggatcagttgttggtactacgttagttgctgaaactgttaaagatttagaaggtaaagatttatctgacaaagttatcgttactaactcaatcgatgaaacgtttgtaccttatgtagaaaaagctttaggcttaattacagaagaaaatggtattacatcaccaagtgcaattgttggtttagaaaaaggtattccaacagttgtaggtgtagaaaaagctgttaaaaacataagcaataacatgttagttacgattgatgctgctcaaggtaaaatctttgaaggatatgcaaacgtacta

SEQ ID NO: 198 - DNA, 1179 bp, Staphylococcus aureus
atgcaattcgataatattgacagtgctttaatggctttaaaaaatggagaaccaattattgtagtagatgatgagaatcgtgaaaatgaaggtgatttagtagcggttactgaatggatgaacgataataccattaattttatggcgaaagaagcaaggggattaatatgcgcaccagtgtctaaagatattgcacaacgtttggatttggtacaaatggttgatgataactccgacatctttggtacgcaatttacagtgagtattgatcatgtagatacaacaacaggaattagtgcttatgaacgtacattgactgccaaaaagctcattgatcctagtagtgaagctaaagattttaatcgtcctggtcatttatttccattagtagcacaagataaaggcgtattagctagaaatggacacacagaagcggctgttgatttagctaaacttactggtgccaagcccgctggtgtcatttgtgagattatgaatgatgacggcacgatggcgaaaggacaagatttacaaaagtttaaagaaaaacatcaattaaagatgattacgattgatgatttaattgaatatcgtaaaaaattagaaccagaaattgaatttaaggcaaaagtgaaaatgcctacagatttcggaacatttgatatgtatggttttaaagcgacatacacagatgaagagatagttgtactgacaaaaggtgcaattcgacaacatgaaaatgtacgcttacattctgcgtgccttacaggcgatattttccatagtcaacgttgtgattgtggtgctcaacttgaatcgtctatgaagtatatcaatgaacatggtggcatgattatttatctacctcaagaaggtcgtggcataggattgttaaacaaattacgcgcatatgaattaattgagcaaggatatgatacagtaactgcaaatttagcattaggttttgatgaagatttgcgagattatcatattgctgcacagattttaaaatattttaacatcgaacatatcaatttattaagtaataatccaagtaaatttgagggattaaaacaatatggcattgatattgcagaaagaattgaagttatcgtaccagaaacggtacataatcatgattatatggaaacgaaaaaaataaaaatgggtcatttaata

SEQ ID NO: 199 - DNA, 981 bp, Staphylococcus aureus
atgaaaatgaaaaaattagtcaaatcatcagttgcttcatcaattgcactgcttttgctatcgaatacagttgatgcagctcaacatatcacacctgtaagcgagaaaaaagtagatgacaaaatcactttatacaaaacaacagcaacatctgataatgataaattgaatatttctcaaattttaacgtttaatttcattaaggataaaagttatgacaaagatacgttagtacttaaggcagccggaaacattaattcaggttataaaaagcctaatccaaaagattacaattactcacagttttattggggcggtaagtataatgtttcggttagttcagaatcaaatgatgctgtaaatgttgttgactatgcacctaaaaatcaaaatgaagaattccaagttcaacaaacattaggttattcttatggcggagatattaatatatctaatggcttatcaggtggattaaatggatcaaaatcattttcagaaacgataaattataaacaagaaagttacagaactacgattgatagaaaaacaaatcataaatcaattggctggggtgttgaggcgcacaaaattatgaataatggttggggaccatatggtagagatagttatgacccaacatatggtaatgaactgtttttaggcggtagacaaagtagttcaaatgctggtcaaaatttcttgccaacacatcaaatgcctttattggcgcgtggtaactttaacccagaatttataagcgtactttctcataaacaaaatgatacaaaaaaatctaaaatcaaagtaacttaccaaagagaaatggatagatatactaatcaatggaatcgactacactgggttggtaataactacaaaaatcaaaatacagtaacgtttacatctacttatgaagttgactggcaaaaccatactgttaaattaatcggtacggattctaaagaaactaatcctggagta

SEQ ID NO: 200 - DNA, 870 bp, Staphylococcus aureus
atgaagaaaaaagcgttactaccattatttttaggtattatggtctttttggctggttgtgactattctaaacctgaaaaacgtagtgggtttttctacaatacattcgtagatccaatgaaaaatgtattggattggttgggaaataacttattaaacgacaattatggtttagctattattatccttgtattggtaattcgtattattttattaccattcatgttgtcaaactataaaaatagtcatatgatgcgtcaaaaaatgaaagttgcaaagccagaagttgaaaaaattcaagaaaaagtgaaacgtgcgcgtacacaagaagaaaaaatggctgcaaaccaagaattaatgcaagtatataaaaagtatgacatgaacccgattaagagtatgttgggttgtttaccaatgctaatccaattaccaatcatcatgggattatactttgtacttaaagaccaacttgtagatggtttgtttaaatatccacacttcttatggttcgatttaggacgtcctgatatttggattacaattattgccggtgttttatactttatccaagcatatgtatcaagtaaaacgatgccagacgaacaacgtcaaatgggttacatgatgatggtcatttcaccaattatgattatctggatttcattaagctcagcatcagcacttggtttgtactggtcagtcagtgcggcgttccttgtagttcaaacacactttgcgaacatttattatgaaaaagtcgctaaaaaagaagtacaacctttcattgaagcgtatgaaagagagcacaacggcggcagcaataaaaaaggcaaaaacacacaagttgtgtctaaaaagaaaaagaaa

SEQ ID NO: 201 - DNA, 7434 bp, Staphylococcus aureus
atgaatttattcagacaacaaaaatttagtatcagaaaatttaatgtcggtattttttcagctttaattgccactgttacttttatatctactaacccgacaacagcgtctgcagcagagcaaaatcagcctgcacaaaatcaaccagcacaaccagctgatgccaatacacagcctaacgcaaatgctggtgctcaagctaatcctacagcacagccagctgcacctgccaaccaaggacaaccagcagtacaaccagcaaaccaaggtggacaggctaatccagcaggaggagcagcacaaccaaatacacaaccagctggacaaggtaatcaagctgatccgaataacgctgcacaagcacaacctggaaatcaagcaacaccggcaaaccaagcaggtcaaggaaataaccaagcaacacctaataataatgcaacaccggcaaatcaaacacagccagcgaatgctccagcagcagcgcaaccagcagcacctgtagcagcaaacgcacaaactcaagatccaaatgctagcaatactggtgaaggcagtattaatacgacattaacatttgatgatcctgccatatcaacagatgagaatagacaggatccaactgtaactgttacagataaagtaaatggttattcattaattaacaacggtaagattggtttcgttaactcagaattaagacgaagcgatatgtttgataagaataaccctcaaaactatcaagctaaaggaaacgtggctgcattaggtcgtgtgaatgcaaatgattctacagatcatggtaactttaacggtatttcaaaaactgtaaatgtaaaaccagattcagaattaattattaactttactactatgcaaacgaatagtaagcaaggtgcaacaaatttagttattaaagatgctaagaaaaatactgaattagcaactgtaaatgttgctaagactggtactgcacatttatttaaagtaccaactgatgctgatcgtttagatttacaatttattcctgacaatacagcagttgctgatgcttcaagaattacaacaaataaagatggttataaatactattcattcattgataatgtaggtctattctcaggatcacatttatatgtcaaaaatagagatttagcaccgaaagcaactaacaataaagaatatactattaatactgaaatcggtaacaatggtaattttggtgcttcattaaaagcagatcaatttaaatatgaagtaacattaccacaaggtgtaacttacgttaataattcattaactacaacattccctaatggtaatgaagacagtacagtattgaaaaatatgactgttaattatgatcaaaatgcaaataaagttacatttacaagccaaggtgtgacaacggcacgtggtacacacactaaagaagttttattcccagataaatctttaaaattatcatataaagttaatgttgcgaatatcgatacacctaaaaatattgattttaatgaaaaattaacatatcgtactgcttcagatgttgtaattaataatgcgcaaccagaagttacactaactgcagatccattttcagtagcggttgaaatgaacaaagatgcgttgcaacaacaagtaaactcacaagttgataatagtcattacacaacagcatcaattgcagaatacaataaacttaaacaacaagcagatactattttaaatgaagatgcgaatcatgttaaaactgcaaatcgtgcatctcaagcggatattgatggtttagtaactaaattacaagctgcattaattgataatcaagcagcaattgctgaattagatactaaagctcaagaaaaggttacagcagcacaacaaagtaaaaaagttacgcaagatgaagttgcagcacttgtaactaaaattaacaatgataaaaataatgcaatcgcagaaattaataaacaaactacagcacaaggtgtcacaactgaaaaagataatggtatcgcagtgttagaacaagatgtgattacaccaacagttaaacctcaagcgaaacaagatattatccaagcagttacaactcgtaaacaacaaattaaaaagtcaaatgcatcattacaagatgaaaaagatgtagcaaatgataaaattggtaaaattgaaacaaaggcaattaaagatattgatgcagcaacaacaaatgcacaagtagaagccattaaaacaaaagcaatcaatgatattaatcaaactacacctgctacaacagctaaagcagcagctcttgaagaatttgacgaagttgttcaagcacaaattgatcaagcacctttaaatcctgatacaacaaatgaagaagtagcggaagctattgaacgtattaatgcagctaaagtttctggtgttaaagcaattgaagcgacaacgactgcacaagatttagaaagagttaaaaacgaagaaatctcaaaaattgaaaatattactgactctacgcaaacaaaaatggatgcctataatgaagttaaacaagctgcaacagctagaaaagctcaaaatgctacagtttcaaatgcaacaaatgaagaagtagcagaagctgatgcagcagtagatgcagctcaaaagcaaggtttacatgacatccaagttgttaaatcaaaacaggaagttgctgatacaaaatcaaaagtattagataaaatcaatgcaattcaaacacaagcaaaagttaaacctgcagctgatacggaagtagaaaacgcatataatacacgtaaacaagaaattcaaaatagcaatgcttcaactacagaagaaaaacaagctgcatatacagaattagatactaaaaagcaagaagcaagaacaaatcttgatgctgcaaatacaaacagtgatgtaacaacagctaaagacaatagtattgctgcaattaatcaagttcaagctgccacaactaagaaatcggatgcaaaagcggaaatcgctcaaaaagcaagtgaacgtaaaacagcaattgaagcaatgaatgattcgactactgaagaacaacaagcagcgaaagacaaagtggatcaagcagtagttactgcaaacgctgatatagataatgctgcagcaaacaatgatgtggataatgcaaaaactacaaatgaagctacaatcgcagccattacacctgatgcaaatgttaaaccagcagcaaaacaagcaattgcagataaagtacaagctcaagaaacagcaattgatggaaataacggctcaacaactgaagaaaaagcagctgctaaacaacaagttcaaactgaaaaaacaacagctgatgccgcaatagatgcagcacatacaaatgcggaagttgaagcggctaaaaaagcagcaattgctaaaattgaagcgattcagccagcaacaacaactaaagataatgcgaaagaagcaattgctacgaaagcgaatgaacgtaaaacagcaatcgctcaaacgcaagacattactgctgaagaaattgcagcggctaatgcggacgtagataatgctgtgacacaagcaaatagcaacattgaagctgctaatagtcaaaatgatgtagaccaagcgaaaacgacaggtgaaaatagtattgatcaagtaacaccaacagttaataaaaaagcaactgcacgtaatgaaatcacagcaattttaaataacaaattgcaagagattcaagctacgccagatgcaacagatgaagaaaaacaagcagctgatgctgaagcaaatactgaaaatggtaaagcaaatcaagccatttcagcagcaactactaacgcacaagttgatgaagctaaagcaaatgcagaagcagcgattaatgcggtaacaccaaaagttgtgaagaaacaagcggctaaagatgaaattgatcaattacaagcaacgcaaacaaatgttatcaataatgatcagaacgctacaacagaagaaaaagaagcagctattcaacaattagcaacagcagttacagacgcgaaaaataatattacagctgcaactgatgataatggtgtagatcaggcgaaagacgctggaaagaattcaattcaaagcacgcaaccagcaacagcggttaaatcaaatgctaaaaatgatgttgatcaagctgtgacaactcaaaatcaagcaattgataatacaactggtgctacaactgaagagaaaaatgcagcaaaagatttagttttaaaagctaaagaaaaagcgtatcaagatatcttaaatgcacaaacaactaatgatgttacgcaaattaaagatcaagcagttgctgatattcaaggtattactgcagatacaacaattaaagatgttgcgaaagatgaattagcaacaaaagcaaacgaacaaaaagcgcttattgcacaaactgcagatgcgactactgaagaaaaagaacaagcaaatcaacaagtagacgcacaattaacacaaggtaatcaaaatattgaaaatgcacagtcaatcgatgatgtaaacactgcaaaagataatgcaattcaagcaattgacccaattcaagcatcaacagatgttaaaacgaatgcaagagcggaattgctaactgaaatgcaaaataaaataactgaaatacttaataataatgagactactaatgaagaaaaaggtaacgatattggaccagttagagcagcatatgaagaaggtttaaataatattaatgcagcaactactacaggtgatgtaactactgctaaagatacagcagtacaaaaagttcaacaacttcatgcaaatcctgttaagaaaccagcaggtaaaaaagaattagatcaagctgcagctgataagaaaacacaaatagaacaaacaccaaatgcatcacaacaagaaattaatgatgcaaaacaagaagttgatactgaattaaatcaagcgaaaacaaatgtcgatcaatcatcaacaaatgaatatgttgataatgcagttaaagaaggaaaagctaaaattaatgcagttaaaacatttagtgagtacaaaaaagatgctttagctaaaattgaagatgcatataatgctaaagtaaacgaagcggataactctaacgcatcgacttcaagtgaaattgctgaagcgaaacaaaaacttgctgaattaaaacaaactgcggatcaaaatgttaatcaagctacttctaaagatgacattgaagttcaaattcataatgacttagataatattaacgattacacaattccaacaggtaaaaaagaatcagctacaacagatttatatgcttatgcagatcagaagaaaaataatatttcagctgacactaatgcaacacaagatgaaaagcaacaagcaattaagcaagttgaccaaaatgttcaaactgcattagaaagcattaataatggtgtggataatggtgacgttgatgatgcattaacacaaggtaaagcagcaattgatgctattcaagtagatgctactgttaaacctaaagcgaaccaagctattgaagttaaagcagaagatacgaaagaatctattgatcaaagtgaccagttaactgctgaagaaaaaactgaagcattagcaatgattaaacaaattacagatcaagctaaacaaggtattactgatgcaacaacaactgctgaagttgaaaaagcgaaagctcaaggacttgaagcatttgataacattcaaatcgactcaacagaaaaacaaaaagctatcgaagaattagaaactgcactagaccagattgaagcaggtgtaaatgtcaacgctgatgctacaactgaagaaaaagaagcgtttacgaatgctttagaagacattttatcaaaagcaactgaagatatttctgatcaaactacaaatgcagaaatcgctactgtcaaaaatagtgcgcttgaacaacttaaagcacaacgtattaatcctgaagttaagaaaaatgctttggaagcaatcagagaagtggttaacaagcaaatagaaataattaaaaatgcagatgcagatgcatcggcgaaagaaattgcacgtacggatttaggtagatattttgacagatttgctgataaattagataaaacacaaacaaatgcagaagttgctgaattacaaaatgtaacgatacctgcaattgaagcgattgtgcctcagaatgatccagatgctaatgatactaataatggtatagataataatgatgcaacagcaaattcaaatgctaatgcaacaccagaaaatactggacaacctaacgtatctgagacgacagctaatggcaaagcagacgcttctccgacaacaccaaataatagtgatgcggcaacaggtgaaacaacagcaacatcagcaactgatgatgcaaatgataaaccgcaagctaataacaattctagtgtagatgcatcaacaaacagtccgacaatggataacgatgtaactagtaaaccagaagtagaatcaactaataacggcacaactgataaacctgtaacagaaactgataatgcaacgccagcagaaagcacaacaaataacaatagtacaactacagcaacaaacgagaatgcaccaacaggatcaacagcaacggctccaacaactgcgagcacagaagcagcatcatctgctgatagcaaagataatgcatctgtaaatgattcaaaacaaaatgctgaagtaaataatagtgctgaatctcaatcaactaatgacaaggttgcacaaccaaaatctgaaaataaagctaaggcagaaaaagatggtagtgattcaacaaatcaaagtatggttgaatcaacaactgaaacattgccttcagcagacataacagaaccaaatgtaccttctaatacatcaaaagataaagaagaaagtacgacaaatcaaactgatgcaggacaacttaagtctgaaactaacgttgcatctaacgaagcagataaatcgccaagcaaagctgatactgaagtttcgaataaaccatcaacatctgcatcttctgaagcaaaagaaaaaatgacttcaactaatcttagccaaaaagatgatacggcaacagcagatactaatgatacgcaaaaatcagttggttcagctgcaaacaataaagctacgcaaaacgacggtgccaatgcatctccagctacagtttcaaatggaagcaatagtgctaatcaagatatgcttaatgtaactaacactgacgaccaccaagctaagacaaaatcagctcaacaaggaaaagttaataaagctaaacaacaagctaaaactttaccagatactggtatgtcacataatgacgatttaccatatgctgaattagctctaggtgcaggtatggcattcttaattagaagattcactaagaaagaccaacaaactgaagaa

SEQ ID NO: 202 - DNA, 423 bp, Staphylococcus aureus
atgaaactaaaatcatttgttactgccactttagcattgggattattatcaacggtcggagctgcattaccgagtcacgaagcatctgcagatagtaataacggctataaagaaatgactgtggatggttatcacactgttccttacacaatttcagtagatggtattactgcattacatcgaacttactttatcttcccagaaaataaaaatgttctttatcaagaaattgacagtaaagtaaaaaatgaattagcttctcaacgtggtgttacaacagaaaaaattaataatgcccaaacagcaacttatacgcttactttgaatgatggtaataaaaaagtagtgaatctaaagaaaaatgacgacgctaaaaattcaattgatccaagtacaatcaaacagatacaaattgtagttaaa

SEQ ID NO: 203 - DNA, 831 bp, Staphylococcus aureus
atggctattaaaaagtataagccaataacaaatggtcgtcgtaatatgacttcgttagatttcgcagaaatcacgaaaactacacctgaaaagtcattattaaaaccgctaccgaaaaaagcgggacgtaacaaccaaggtaaattgactgtaagacaccatggtggtggacacaaacgtcaataccgtgttatcgatttcaaacgtaacaaagatggtatcaatgcaaaagttgattctattcaatatgatccaaaccgctcagcaaacatcgctttagttgtatatgcagacggtgaaaaacgatatatcattgctcctaaaggattagaagtaggtcaaatcgttgaaagtggtgctgaagctgacatcaaagttggtaacgcattaccattacaaaacattccagttggtacagtagtacacaacatcgagcttaaacctggtaaaggtggacaaatcgctcgttcagctggtgcaagtgctcaagtacttggtaaagaaggtaaatacgtattaatcagattaagatctggtgaagttcgtatgatcttatctacttgccgtgctacaatcggtcaagttggtaacctacaacacgaattagttaacgttggtaaagccggacgttcaagatggaaaggtatccgtccaacagttcgtggttctgtaatgaaccctaacgatcacccacacggtggtggtgaaggtcgtgctcctatcggtagaccatctccaatgtcaccatggggtaaacctacgcttggtaagaaaactcgtcgtggtaaaaaatcatcagacaaacttatcgttcgtggacgtaagaaaaaa

SEQ ID NO: 204 - DNA, 1596 bp, Staphylococcus aureus
atgttagtaaatacgtttaacccatttgataatttattattatcgtctttaattgcagcaataccgattgtactgtttttactatgtttaactgtttttaaaatgaaaggtatttatgcagctattacaacacttgttgtaacattactaattgcaataccatttttcaaattgccagttggtatcgcttctggtgcagtagtcgaaggtttcttccaaggtatcattccgattggctatatcgttatgatggcagtattgttatacaaaattactgttgaatctggacaatttttaacaattcaagatagtattacaaatatttcacaagaccaacgtattcaagttttacttattggatttgcattcaacgcatttttagaaggtgcagcaggatttggtgtaccaattgcaatttgtgcacttttattaacacaattaggatttaatccattaaaagctgcgatgttatgtttagtcgcaaatgcagcgtctggtgcttttggtgcgattggtatccctgtaggtgttgtagaaacgttgaaattacctggagatgtttcagtattaggtgtttctcaatcagcaactttaacattggcaatcataaatttcattattccattcttacttatctttattattgatggttttagaggtgttaaagaaacattaccagcaattttagtagtttcaatcacttatacacttactcaaggattattaactgtattcagtggacctgaattagcagatattattccaccgttattaacaatgttagcattagcagtattttctaaaaaattccaaccaaaacacatttatcgtgttaataaagatgaagaaattgaacctgcaaaagcacattctgcaaaagcagtattacatgcatggagcccattcattgtattaacagtcattgtaatgatttggagtgcgccattctttaaaaacttattcttaccaaatggtgctttatcatcattagtatttaaattcaacttacctggaacaatcagcgaagttacgcataaaccattagtattgactttaaatattattggacaaacaggtacagctattttattaactattattattacaattttaatgtctaaaaaggttaactttaaagatgcaggtagattattcggcgttacatttaaagagttgtggttaccagttcttacaatttgtttcatcttagcaatttctaaaatcacaacttatggtggtttaagtgcagcaatgggtcaaggtattgctaaagcaggtaatgtcttcccagttctatcaccaattttaggttggataggtgtgtttatgacaggatcagttgtaaataacaactcattatttgcaccaattcaagcttctgttgcacaacaaattggaacaagtggttcacttcttgtatctgctaatacagttggtggtgtagcggcaaaattgatttcaccacaatcaattgcaattgcaactgcagcagtaaaacaagttggtaaggaatcagaattattaaaaatgacattgaaatacagtgtatgtttactaatattcatctgtatttggactttcatcttgtcattatta

SEQ ID NO: 205 - DNA, 945 bp, Staphylococcus aureus
atgcttaaaaataaaatattaactacaactttatctgtgagcttacttgcccctcttgccaatccgttattagaaaatgctaaagctgctaacgatactgaagacatcggtaaaggaagcgatatagaaattatcaaaaggacagaagataaaacaagtaataaatggggcgtgactcaaaatattcaatttgattttgtaaaggataaaaaatataacaaagatgctttgatattaaagatgcaaggattcattagctctagaacaacatattacaactataaaaaaactaatcatgttaaagctatgcgatggccattccaatataatattggtttaaaaacaaatgataaatatgtttctttaattaattatttacctaaaaataaaattgaatctacaaacgtgagtcagatattaggatacaatatcggtggtaatttccaatcagccccatcactcggtggtaatggatcatttaactattctaaatcgattagctatacacaacaaaattatgtaagtgaagtagaacaacaaaactcaaaaagtgttttatggggcgtcaaagcgaattcattcgccactgaatcaggtcaaaaatcagcctttgatagcgatttatttgtaggctacaaacctcatagtaaagatcctagagattatttcgttccagacagtgagttaccacctcttgtacaaagtggatttaacccttcatttatcgccacagtatctcatgaaaaaggttcaagcgatacaagcgaatttgaaattacttacggaagaaacatggatgtcactcatgccattaaaagatcaacgcattatggcaacagttatttagacggacatagagtccataatgcatttgtaaatagaaactatactgtgaaatacgaggtcaattggaagactcatgaaatcaaggtgaaaggacagaat

SEQ ID NO: 206 - DNA, 975 bp, Staphylococcus aureus
atgaaaatgaataaattagtcaaatcatccgttgctacatctatggcattattattactttctggtactgctaatgctgaaggtaaaataacaccagtcagcgtaaaaaaagtcgatgacaaagttactttatacaaaacaacagccacagcagattctgataaatttaaaatttcacagattttaacatttaatttcatcaaagataaaagttatgataaagatactttagtacttaaagctactgggaatattaactcaggctttgtgaaacctaatcctaatgactatgacttttcaaaattatattggggagctaaatacaatgtatctataagctcacaatctaatgattcagtaaacgtcgttgattatgcaccaaaaaatcaaaatgaagagtttcaagttcaaaatactttaggctatacatttggtggtgacattagtatctctaatggtttatctggtggacttaatggaaatacagctttttctgaaacaattaattataaacaagaaagttacagaacaacattaagtcgcaacacaaattataaaaatgttggctggggagttgaagcacataaaattatgaataatggttggggaccttatggaagagatagcttccacccaacatatggtaatgaactcttcttagctggcagacaaagcagtgcatacgctggccaaaacttcatagcgcaacaccaaatgccattattatctagaagtaacttcaatccagaatttttaagcgtactatcacacagacaagatggcgctaaaaaatctaaaattacagtaacttatcaacgtgaaatggatttataccaaattcgttggaatggcttctactgggcaggcgcaaattataaaaactttaaaactagaacatttaaatcaacatatgaaattgattgggaaaatcacaaagtgaaattgttagatacaaaagaaactgaaaacaataaa

SEQ ID NO: 207 - DNA, 1008 bp, Staphylococcus aureus
atgaatagagagatgttgtatttaaatagatcagatattgaacaagcgggaggtaatcattcacaagtttatgtggacgcattaacagaagcattaacagcccatgcgcacaatgattttgtacaaccgcttaagccgtatttaagacaggatcctgaaaatggacacatcgcagatcgaattattgcaatgccaagtcatatcggtggtgaacacgcaatttcaggtattaagtggataggtagtaagcacgacaatccatcgaaacgtaatatggagcgtgcaagtggcgtcattattttgaatgatccagaaacgaattatccaattgcagttatggaagcaagtttaattagtagtatgcgtactgcagcagtttcagtgattgcagcaaagcatttggctaaaaaaggatttaaagacttaacaatcattggatgcgggctaatcggagacaagcaattacaaagtatgttagagcaattcgatcatattgaacgcgtgtttgtttacgatcaattctctgaagcatgtgcacgctttgttgatagatggcaacaacagcgtccggaaattaattttattgcgacagaaaatgctaaagaagcagtatcaaatggtgaagtagtcattacatgtaccgtaacggatcaaccatacattgaatatgattggttacaaaagggtgcatttattagcaacatttctatcatggatgtgcataaagaagtctttattaaagctgacaaagtcgtagtagatgactggtcacaatgtaatcgagaaaagaaaactattaaccaattggtgttagaaggtaaattcagcaaagaagctcttcatgctgaactaggacaacttgtgacaggtgacataccaggacgtgaagacgatgatgagatcatattacttaatccgatgggtatggctatcgaagatatttcaagtgcttattttatttatcaacaggcacaacaacaaaatattgggacaacattgaacctatat

SEQ ID NO: 208 - DNA, 1143 bp, Staphylococcus aureus
atgaaaaaaattatggttattttcggtacgagacccgaagcaataaaaatggcaccattagtaaaagaaattgatcataatgggaactttgaagcgaacattgtgattacagcacaacatagagatatgttagatagtgtgttaagtatatttgatattcaagctgatcatgatttaaatattatgcaagatcaacaaacattagcaggccttacggcgaatgcacttgctaaacttgatagcatcattaatgaggaacaaccggatatgattttagtacatggtgatactacaacgacttttgtaggaagtttggcagcattttatcatcaaattccggtcggacatgtagaagctggacttcgaacacatcagaaatactcaccatttcctgaagagttaaatcgagtcatggtaagtaatattgctgaattgaattttgcgccaacagtaattgcagctaaaaatttactttttgaaaacaaagacaaagagcgtatctttattactggaaatacagttattgacgcattgtcaacaacagttcaaaatgattttgtttcaacgattattaataaacataaaggcaagaaagttgttttactaacagcgcatcgtcgtgaaaatattggggaaccgatgcatcagatttttaaagcagtaagagatttggcagatgaatataaagatgttgtcttcatttatccaatgcatcgtaatccaaaggtaagagcgattgccgaaaaatatttatctgggagaaatcggattgaattaattgagccattagatgcgattgagttccataattttacaaatcaatcgtacctcgtgctgacagattctggtggtattcaagaggaggctcctacatttggaaaacctgtgttggtattaaggaatcatacagagcgtcccgaaggcgttgaggcgggaacatcgagagtaattggcacagattatgacaatattgttcgaaatgtgaaacaattgattgaggatgatgaagcgtatcaacgtatgagtcaagcgaataatccatatggtgatggacaagcatcacgacgtatttgtgaagcaatagaatattattttggattgcgcacagacaagccggatgaattcgtacctttacgtcacaaa

SEQ ID NO: 209 - DNA, 7173 bp, Staphylococcus aureus
atgattatgggtaatttgagatttcaacaggaatattttcgtatatacaaaaataatacagaatcaacgacacaccgtaatgcgtattgggttaaactcgctaaaaatgttgaagctactaaaatgatgtatgcattatcgacaattgtgcaacaacatgcatctataagacatttttttgatgttactaccgatgacaatttaacaatgatacttcatgaatttctgccttttattgagataaaacaagttccatcttcttccgcaaactatgatttagaagctttttttaagcaagaattaagtacttaccattttaatgattcacctttattcaaagttaaattgtttcagttcgctgatgctgcatatatactattagattttcatgtgtccattttcgatgatagtcaaattgatatttttcttgatgatttatgcaatgcatatcgtggcaatactgttattaacaatactcgacagcatgcacatataaatagaaatgatgataaagacaatcaagatgcatcgcatatagcattagactcaaactattttcggttagagaataactctgacatccatattgatagttattttccaattaagcatccatttgaacaagctttatatcaaacgtatttgattgatgatatgacatcaatagatatggcatcgttggctgttagtgtgtatttagctaatcatataatgagtcaacaacatgatgtcacattaggtatacatgtaccatcacatttaccaaatgatttacacggaaatattgtgccgttaacgttaacaatcgatgcaaaagatgtatgtcaacgttttacaacagattttaataaatgtgtgttgcaaaatatgtcgcaattacagtgcgcgaagtcttcgctttcactagagactatttttcattgttatcatcatatgatgtcttgttgtaatgatgttattgaggatgtacatcaaatacatgatgcacatacatctttagcggatattgaaatttttccacatcaacacgggttcaaaattatatataacagtgcagcatatgatttgctctcaatcgagacgctgagtgacttagttcgaaatatttatttgcaaattactgaagaaaatggaaataaacgaacaactgtagatgaacttaatttgatgacagaacgtgatattcaattatatgacgatatcaatttaagtttgcctgagatagatgatgcgcaaacagttgttaccttatttgagcaacaagttgaagcaacgccgaatcatgtcgctgtgcaatttgacggagtgtttataacatatcaaacattgaatgcacgcgcgaatgatttagcacaccgtttgagaaaccagtatggtgttgaacctaatgatcgtgtcgctgtcatagctgaaaaaagtattgagatgataatagcgatgataggtgtgttgaaagctggtggggcttacgtgccaattgatccgaactatccaagtgatcgtcaggagtacattttaaaagatgtaacgcctaaagttgtaataacgtaccaagctttatatgaaaatggtaaacaaaatattaatcacattgatttgaataagatagcgtggaaaaatattgataatctttctaaatgtaacacgttagaagatcatgcttatgttatttacacgtcggggacaactggtaaccctaaagggacactaattccgcaccgaggtattgttcgcttggtccatcaaaatcattatgtaccattaaatgaagagacgacgattttgttatcaggaactatagcctttgatgctgcaacatttgaaatatatggtgcattgctcaatggtggaaagctgattgttgctaaaaaagaacaattattaaatccaatagcggtagaacaattaatcaatgaaaatgacgttaatactatgtggttaacctcctcattatttaatcagattgctagtgaacgaatagaagtattggtatcgttaaagtatttattaattggtggagaagtattgaatgctaagtgggtggatttgcttaatcaaaaaccgaagcatcctcaaattattaatggttatggaccaactgaaaatacaacatttacaacgacgtataatatacctaacaaagttccaaatcgtattcctattggtaaaccgattctgggtactcatgtttatatcatgcaaggcgagcgtcggtgtggcgttggtattcctggagaattatgtacaagtggctttgggttagctgcaggttatttaaatcagccagaattgacagcagataaatttatcaaagattcaaatataaatcagctgatgtatagaagtggtgatatcgttcgtttgttacccgatggcaacatagattatttatatcgaaaggacaaacaagttaagattcgagggtttaggattgagttgtcagaggttgagcatgcgctcgagcgtatacaaggtattaataaagcagttgttattgttcaaaatcatgatcaagatcagtatatcgttgcttattatgaagcgatgcatacattatcacataataagattaaatcacaattacgtatgaccttaccggagtacatgataccagttaatttcatgcatattgagcaaattcctattactattaatgggaaattagataagaaggcattgcctatcatggactatgtcgatacggatgcctatgtagcaccgagtacagataccgaacacttgctatgccaaatttttgcagatattttacatgtgaatcaagtaggtattcatgataatttctttgaattaggtggccattcattaaaagcaacgttagtggtgaatcggatagaggcatctactgggaaacgattacaaattggtgatttattacaaaagccaactgtatttgaactagcacaagcgattgctaaggttcaagaacaaaactatgaagtgattccagaaactatagttaaagatgattatgtgctgagctctgcacaaaagcgtatgtatttattatggaaatcaaaccataaagatacggtgtataacgtaccttttttatggcggttatcatcagaacttaatgtagctcaattgcgacaagcagtgcagcgtttgatagcgcgacatgagattttacgaacacaatatattgttgtagatgatgaggttcgacaacgtattgtggcagatgttgcagttgactttgaagaagttaacacgcattttacggatgaacaagaaatcatgcgccaatttgtagcaccttttaatttggaaaagccaagtcaaattagagtgagatacattagaagtcccttacatgcatacctctttatagatacgcatcatatcattaatgacggtatgagtaatatacaattaatgaatgatcttaacgcactttatcaacataaattattgttaccacttaaattgcaatataaagactatagtgagtggatgtcgcatcgtgatatgacgaaacatagacaatattggttatctcaattcaaagatgaagtacctattttaagcttaccgacagactatgttagaccaaatattaaaacgacaaatggagcaatgatgtcatttacaatgaatcaacaaatgagacagctacttcaaaagtatgtagaaaagcatcaaattactgattttatgttctttatgagtgtggtcatgacgttgttaagtagatatgctcgaaaagatgatgttgttgtcggtagtgtgatgagtgcgcgtatgcataaaggcacggagcaaatgctaggcatgtttgctaatacgttggtatatagagggcaaccgtcacctgataaaatgtggacacagtttttacaagaggttaaggaaatgagtttggaggcatacgagcatcaagaatacccattcgaatgtttagtaaatgacttagatcaatcacatgatgcctcacggaatccattatttgatgtcatgttagtactacaaaacaatgaaacgaatcatgctcattttgggcatagtaaattaacacacattcaacccaaatcagtgacggcgaaatttgatttatctttcatcattgaagaagatcgcgatgactatacaatcaatatcgagtataataccgatttatatcactcagaaacagttcgtcacatgggtaatcaatgtatgattatgattgattatattttgaagcatcaagatacactacaaatttgtgatataccaaacggcacggaggaacttctaaattgggtcaatacgcatgttaacgatcgaatgcttaatgtcccgggaaataaatctatcataagttactttaatgaagttgtctcacgacaaggtaatcatgttgcgctagtcatgaatgatttgacaatgacgtatgaaacattacgcaactatgtggatgccattgcgcacatgctcctatcaaatggtgtgggcaatggtcaacgggttgccttgtttacagaacgtagttttgaaatgattgcggcgatgttggcgacagttaaagtaggtgcatcttatatacctatcgatattgattttccgaataaacgacaaggtgcaattttggaggatgctaaagtaactgcagtcatgtcttacggcgttgaaattgaaacgacattaccagtcattcaattggaaaatgctaaaggctttgttgaatcaaaggaaaatgaacaatatgatgatttacatggcaatcaacttgaaaacacagcgatgttagataatgagatgtatgctatttacacatctggtacgaccgggatgcctaaaggggttgccatacgacaacgaaatttgttgaatttagtgcatgcatggtcaactgaattgcaattaggcgacaatgaagtatttttgcaacatgcaaatattgtttttgatgcatcagttatggagatttattgttgtttgttaaatggtcatacgcttgtgattccagatagagaggaacgtgttaatccagaacagttacaacaactcattaataagcatcgtgtgacggttgcgtcgattccgttacagatgtgtagtgttatggaagacttttatattgaaaagttgattacaggcggggcaactagtacggcatcctttgttaaatatattgagaagcattgtggcacgtatttcaatgcctatggaccatctgagtcaacagtcatcacatcgtattggtcacatcattgtggtgatttgatacctgagacgattccaattggcaaacccttatctaacatccaagtgtatattatgtcagatggtttgttatgcggtattggtatgccaggcgagttgtgtattgcaggtgatagtttagcgataggatatattaatcgtccagaattaatggctgataaatggcaaaataatccatttggtaaaggaaagttgtatcatagtggtgatttagcacgttatacatctgatggtcaaattgaatttttaggaagaatagataaacaagtgaaagttaacgggtaccgtattgaacttgatgaaattgaaaatgcaatattagctattcgtggtatatctgattgtgttgtaacagtaagtcactttgatacgcatgatatattgaatgcttattatgtcggagagcaacaagtggaacaggatttgaagcaatatttaaatgatcagctgcctaagtatatgattcctaagactataacgcatatcgattgtatgccattaaccacgaatgacaaggtggatactacgcgtttgccaaatccatcacctatacaacagtctaataaagtgtatagcgaaccctctaatgaaattgagcagacatttgttgatgtatttggagaggtattgaaacaaaatgatgtcggtgttgacgatgatttctttgaacttggtggtaactcattagaggcgatgttagttgtctcgcatttaaaacgatttggccatcatatttcaatgcagacattataccaatataaaaccgtgcgacagattgttaattatatgtaccaaaatcaacaatcattagttgcattaccggataatctttcggaattacaaaagattgttatgtctcgttataacttgggtattttagaggatagtctaagtcatcgacctctaggaaatacactattgactggcgcgacaggttttttaggtgcttatctgattgaagtactacaaggatacagtcatcgcatttattgtttcatacgtgctgataatgaggaaatagcatggtataagttgatgacgaatttaaatgattatttttcagaagagacggttgaaataatgttatcaaacattgaagtcattgttggtgatttcgagtgtatggatgatgttgttttaccagaaaacatggatacgattattcatgcaggtgctcgtacagatcactttggtgatgatgatgaatttgaaaaagtaaatgttcaaggtactgttgatgtcatacgtttggcacaacaacatcatgcaaggttaatatatgtgtctacgataagtgtgggaacttattttgatatagacacagaagatgtgacattttcagaagcggatgtctataaagggcaactactaacatcaccatatacacggagcaaattttatagtgaattaaaagtattagaagctgtaaataatggcttagatggtcggattgtacgtgttggtaatttgacgaatccttacaatggaagatggcatatgagaaatataaagactaaccgtttttcaatggtaatgaatgatttgttacaactggattgtatcggggttagcatggctgaaatgcctgtagatttttcttttgtggatacgactgcaagacaaattgtcgcattagcacaggtcaacacaccacaaatcatttaccatgtgctatcacctaataaaatgccggtgaaatctttgttagaatgcgttaagcgcaaagaaattgaactcgtcagcgatgaatcatttaatgaaattttacagaaacaagacatgtacgaaacgattggattaactagtgttgaccgtgaacaacaactagcaatgatagatacaacattaacattaaaaataatgaatcacatcagtgaaaaatggccaacgataactaacaattggctgtatcattgggcacaatatatcaaaacaatattcaataag

SEQ ID NO: 210 - DNA, 1452 bp, Staphylococcus aureus
atgaccaaagaacaacaacttgcagaacgaattattgctgcagtaggtggtatggataatatagatagtgtcatgaactgtatgacacgtgtgcgtattaaagtattagatgagaataaagtagatgaccaagaactaaggcatattgatggtgtcatgggtgttatacacgatgaacgcattcaagttgtggttggacctggtacagtcaataaagtggctaatcatatggcggaattaagtggtgttaaactaggtgacccaataccacaccatcacaatgatagtgaaaaaatggactataaatcatatgcagctgataaagcaaaggcgaataaggaagcgcataaagcaaaacaaaagaatggtaagttgaataaagtattgaaatcaattgccaatatctttataccgttgattcctgcatttattggagctggattaattggtggtattgcagcagtactgagtaacttaatggtggcaggctatatttcaggtgcttggattacgcaacttataacagtatttaatgtcattaaagacggtatgttagcatacttagctattttcactggtattaatgcggctaaagaatttggtgcgacaccaggacttggtggcgtgattggtggtacaacgttattaacgggtattgctggtaaaaatattttaatgaatgtcttcactggagaaccattgcaacctggacaaggtgggattattggcgttatttttgccgtttggattttaagtattgtcgaaaagagattacataaaattgtgccaaatgcgattgatattattgtaacgccgactattgcattgttgattgtaggactattaactatctttatctttatgccattagcaggttttgtttcagacagtttagtttcagtagttaacggaattattagtattggtggcgtatttagtggatttatcattggtgcaagcttcctaccgttagttatgttagggcttcatcatatttttacgccaattcatatagaaatgattaaccaatcaggtgctacttacttattgccaattgcagcgatggctggtgctggacaagtaggtgccgcattagcactttgggtaagatgtaaacgcaacacaacattacgtaatactttaaaaggtgcattgccagttggtttcctaggtatcggagaaccattaatctatggtgtgactttgccattaggtcgacctttcttaactgcttgtattggtggtggtattggtggcgctgtaataggtggaattggacatattggtgccaaagcaataggcccaagtggtgtgtcactattaccattaatctcagataatatgtatttaggttatattgcaggattacttgctgcgtatgctggtggattcgtttgtacatatttatttggaacgacaaaggcgatgcgacagacagatttgttgggtgat

SEQ ID NO: 211 - DNA, 1269 bp, Staphylococcus aureus
atgtctaaaattttaaaatgtatcacgttagccgtggtaatgttattaatcgtaactgcatgtggccctaatcgttcgaaagaagatattgataaagcattgaataaagataattctaaagacaagcctaaccaacttacgatgtgggtggatggcgacaagcaaatggcgttttataaaaaaattacggatcaatatactaaaaaaactggcatcaaagtaaagcttgtaaatattggtcaaaatgatcaactagaaaatatttcgctagacgctcctgcaggaaaaggtccagatatctttttcttagcacatgataatactggaagtgcctatctacaaggcttagctgctgaaatcaaattatcaaaagatgagttgaaaggtttcaataagcaagcacttaaagcgatgaattatgacaataagcaactagcattgccagctatcgttgaaacaaccgcacttttttataataaaaaattagtgaaaaatgcaccgcaaacgttagaagaagttgaagctaatgctgccaaactaactgatagtaaaaagaaacaatacggtatgttatttgatgctaaaaatttctattttaattatccgtttttattcggcaatgatgattatattttcaagaaaaatggcagtgaatatgatattcatcagctaggactaaattcaaaacatgtcgtcaagaatgctgaacgattacaaaaatggtacgacaaagggtatcttcctaaggcagcaacacatgatgtcatgattggtctttttaaagaaggaaaagtaggacaatttgtcactggaccgtggaacattaatgaatatcaagaaacgtttggtaaagatttaggagtaacaacattacctacagatggtggcaaacctatgaaaccatttctaggtgtacgtggttggtatttatctgaatatagtaaacataagtattgggctaaagatttaatgctgtatatcactagtaaagatacattacaaaaatatacagatgaaatgagcgaaattactggacgtgttgacgtgaaatcatctaatccaaatttaaaagtgtttgaaaagcaagcacgtcatgctgaaccgatgcctaatattcctgaaatgcgacaagtttgggaaccgatgggcaatgcaagcatatttatttcaaatggtaagaatcctaaacaagcgttagatgaggcgacgaatgatataacgcaaaatattaagattcttcatccatcacaaaatgataagaaaggagat

SEQ ID NO: 212 - DNA, 1041 bp, Staphylococcus aureus
gtgaaagcattgaaattatatggcgtggaagatttacggtatgaggataatgaaaagccagtcattgaaagtgcgaatgacgttattattaaagtacgagcgactggcatatgtggttcagacacgtcacgatacaaaaaaatggggccatacattaaaggtatgccatttggtcatgaattttcaggtgtagtagatgccattggaagtgatgttacgcatgttaatgtgggcgacaaagtgacaggttgcccagcaataccttgttatcaatgcgagtattgtttaaaaggtgaatatgcacgatgtgaaaagttattcgtcattggctcatatgaacctggatcgttcgcggaatatgtcaaattgccagcgcaaaatgttttaaaggttccagacaatgttgattacattgaagcagcaatggttgagccatcagccgttgttgcgcatgggttttataaatcgaatatacaacctggtatgactgttgcagtaatggggtgtggcagtataggtttgttagctattcaatgggcacgaatatttggtgctgcacatatcatcgctatagatatagatgcgcataaactagatattgcaacatcattgggcgcacatcaaacaatcaattcaaaagaagaaaatcttgagaaattcatcgaaaatcattacgccaatcaaatcgatttagctatagaatcatcaggtgctaaagttacgattggtcaaatattgacgctacctaaaaaaggtggcgaggtggtattactcggaataccatatgatgatattgagattgatcgcgttcattttgaaaaaattctgcgtaacgagttgacagtatgtggctcttggaactgtttgtccagtaattttccgggcaaagagtggacggcaaccttacattatatgaagacgaaagatattaatgtaaagcctattatttctcattttttaccgttagaaaaaggcccggagacatttgataaattagttaacaagaaagaacgatttgataaagtcatgtttacgatttat

SEQ ID NO: 213 - DNA, 789 bp, Staphylococcus aureus
atgcaagcattacaaacatttaattttaaagagctaccagtaagaacagtagaaattgaaaacgaaccttattttgtaggaaaagatattgctgagattttaggatatgcaagatcagacaatgccattagaaatcatgttgatagcgaggacaagctgacgcaccaatttagtgcatcaggtcaaaacagaaatatgatcattatcaacgaatcaggattatacagtctaatcttcgatgcttctaaacaaagcaaaaacgaaaaaatcagagaaaccgctcggaaattcaaacgatgggtaacatcagatgtcctaccagctattcgcaaacacggtatatacgcaacagacaatgtaattgaacaaacattaaaagatccagactacatcattacagtgttgactgagtataagaaagaaaaagagcaaaacttacttttacaacaagaaatcggagaactaaaacccaaagcagactatgtagatgaaatcttaaagtcaactggcacattagccacaactcaaatcgcggcagactacggtatatcagcacaaaagttaaacaaactactacacgaagctagactacaacgaaaagtaaataaacagtgggtgctttactcagaacacatgggcaagagttacacagaatcagacactatagcaattgtacgctctgacggtagagaagacacagttttacaaactagatggacacaaaaaggcagattgaaaatacatgaaatcatgactgaattcggttatgaagctaatttagggggagcg

SEQ ID NO: 214 - DNA, 570 bp, Staphylococcus aureus
atgaaattaaaatcattagcagtgttatcaatgtcagcggtggtgcttactgcatgtggcaatgatactccaaaagatgaaacaaaatcaacagagtcaaatactaatcaagacactaatacaacaaaagatgttattgctttaaaagatgttaaaacaagcccagaagatgctgtgaaaaaagctgaagaaacttacaaaggccaaaagttgaaaggaatttcatttgaaaattctaatggtgaatgggcttataaagtgacgcaacaaaaatctggtgaagagtcagaagtacttgttgctgataaaaataaaaaagtgattaacaaaaagactgaaaaagaagatacaatgaatgaaaatgataactttaaatatagcgatgctatagattacaaaaaagccattaaagaaggacaaaaagaatttgatggtgatattaaagaatggtcacttgaaaaagatgatggcaaacttgtttacaatatcgatttgaaaaaaggtaataaaaaacaagaagttactgttgatgctaagaacggtaaagtattaaagagtgagcaagatcac

SEQ ID NO: 215 - DNA, 693 bp, Staphylococcus aureus
atgaaaatgaaaaatattgcaaaaataagtttgttattaggaatattagcaacaggtgtaaacactacaacggaaaaaccagttcatgccgaaaagaaacctattgtaataagtgaaaatagcaaaaaattaaaagcttattataatcaacctagtattgaatataaaaatgtgacaggttatatcagtttcattcaaccaagtattaaatttatgaatatcatagatggtaattctgttaataatattgctttaattggcaaagataagcaacattatcatacgggtgtacatcgtaatcttaatatattttacgttaatgaggataagagatttgaaggtgcaaagtactctattgggggtatcacgagtgcaaacgataaagctgtcgacctaatagcagaagcaagagttattaaagaagatcatactggtgaatatgattatgactttttcccatttaaaatagataaagaagcgatgtcattgaaagagattgattttaaattaagaaaataccttattgataattatggtctttacggtgaaatgagtacaggaaaaattacagtcaaaaagaaatactatggaaagtatacatttgaattggataaaaagttacaagaagaccgtatgtccgatgttatcaatgtcacagatattgatagaattgaaatcaaagttataaaagca

SEQ ID NO: 216 - protein, 585 aa, Staphylococcus aureus
MRKTKIVCTIGPASESEEMIEKLINAGMNVARLNFSHGSHEEHKGRIDTIRKVAKRLDKIVAILLDTKGPEIRTHNMKDGIIELERGNEVIVSMNEVEGTPEKFSVTYENLINDVQVGSYILLDDGLIELQVKDIDHAKKEVKCDILNSGELKNKKGVNLPGVRVSLPGITEKDAEDIRFGIKENVDFIAASFVRRPSDVLEIREILEEQKANISVFPKIENQEGIDNIAEILEVSDGLMVARGDMGVEIPPEKVPMVQKDLIRQCNKLGKPVITATQMLDSMQRNPRATRAEASDVANAIYDGTDAVMLSGETAAGLYPEEAVKTMRNIAVSAEAAQDYKKLLSDRTKLVETSLVNAIGISVAHTALNLNVKAIVAATESGSTARTISKYRPHSDIIAVTPSEETARQCSIVWGVQPVVKKGRKSTDALLNNAVATAVETGRVSNGDLIIITAGVPTGETGTTNMMKIHLVGDEIANGQGIGRGSVVGTTLVAETVKDLEGKDLSDKVIVTNSIDETFVPYVEKALGLITEENGITSPSAIVGLEKGIPTVVGVEKAVKNISNNMLVTIDAAQGKIFEGYANVL

SEQ ID NO: 217 - protein, 393 aa, Staphylococcus aureus
MQFDNIDSALMALKNGEPIIVVDDENRENEGDLVAVTEWMNDNTINFMAKEARGLICAPVSKDIAQRLDLVQMVDDNSDIFGTQFTVSIDHVDTTTGISAYERTLTAKKLIDPSSEAKDFNRPGHLFPLVAQDKGVLARNGHTEAAVDLAKLTGAKPAGVICEIMNDDGTMAKGQDLQKFKEKHQLKMITIDDLIEYRKKLEPEIEFKAKVKMPTDFGTFDMYGFKATYTDEEIVVLTKGAIRQHENVRLHSACLTGDIFHSQRCDCGAQLESSMKYINEHGGMIIYLPQEGRGIGLLNKLRAYELIEQGYDTVTANLALGFDEDLRDYHIAAQILKYFNIEHINLLSNNPSKFEGLKQYGIDIAERIEVIVPETVHNHDYMETKKIKMGHLI

SEQ ID NO: 218 - protein, 327 aa, Staphylococcus aureus
MKMKKLVKSSVASSIALLLLSNTVDAAQHITPVSEKKVDDKITLYKTTATSDNDKLNISQILTFNFIKDKSYDKDTLVLKAAGNINSGYKKPNPKDYNYSQFYWGGKYNVSVSSESNDAVNVVDYAPKNQNEEFQVQQTLGYSYGGDINISNGLSGGLNGSKSFSETINYKQESYRTTIDRKTNHKSIGWGVEAHKIMNNGWGPYGRDSYDPTYGNELFLGGRQSSSNAGQNFLPTHQMPLLARGNFNPEFISVLSHKQNDTKKSKIKVTYQREMDRYTNQWNRLHWVGNNYKNQNTVTFTSTYEVDWQNHTVKLIGTDSKETNPGV

SEQ ID NO: 219 - protein, 290 aa, Staphylococcus aureus
MKKKALLPLFLGIMVFLAGCDYSKPEKRSGFFYNTFVDPMKNVLDWLGNNLLNDNYGLAIIILVLVIRIILLPFMLSNYKNSHMMRQKMKVAKPEVEKIQEKVKRARTQEEKMAANQELMQVYKKYDMNPIKSMLGCLPMLIQLPIIMGLYFVLKDQLVDGLFKYPHFLWFDLGRPDIWITIIAGVLYFIQAYVSSKTMPDEQRQMGYMMMVISPIMIIWISLSSASALGLYWSVSAAFLVVQTHFANIYYEKVAKKEVQPFIEAYEREHNGGSNKKGKNTQVVSKKKKK

SEQ ID NO: 220 - protein, 2478 aa, Staphylococcus aureus
MNLFRQQKFSIRKFNVGIFSALIATVTFISTNPTTASAAEQNQPAQNQPAQPADANTQPNANAGAQANPTAQPAAPANQGQPAVQPANQGGQANPAGGAAQPNTQPAGQGNQADPNNAAQAQPGNQATPANQAGQGNNQATPNNNATPANQTQPANAPAAAQPAAPVAANAQTQDPNASNTGEGSINTTLTFDDPAISTDENRQDPTVTVTDKVNGYSLINNGKIGFVNSELRRSDMFDKNNPQNYQAKGNVAALGRVNANDSTDHGNFNGISKTVNVKPDSELIINFTTMQTNSKQGATNLVIKDAKKNTELATVNVAKTGTAHLFKVPTDADRLDLQFIPDNTAVADASRITTNKDGYKYYSFIDNVGLFSGSHLYVKNRDLAPKATNNKEYTINTEIGNNGNFGASLKADQFKYEVTLPQGVTYVNNSLTTTFPNGNEDSTVLKNMTVNYDQNANKVTFTSQGVTTARGTHTKEVLFPDKSLKLSYKVNVANIDTPKNIDFNEKLTYRTASDVVINNAQPEVTLTADPFSVAVEMNKDALQQQVNSQVDNSHYTTASIAEYNKLKQQADTILNEDANHVKTANRASQADIDGLVTKLQAALIDNQAAIAELDTKAQEKVTAAQQSKKVTQDEVAALVTKINNDKNNAIAEINKQTTAQGVTTEKDNGIAVLEQDVITPTVKPQAKQDIIQAVTTRKQQIKKSNASLQDEKDVANDKIGKIETKAIKDIDAATTNAQVEAIKTKAINDINQTTPATTAKAAALEEFDEVVQAQIDQAPLNPDTTNEEVAEAIERINAAKVSGVKAIEATTTAQDLERVKNEEISKIENITDSTQTKMDAYNEVKQAATARKAQNATVSNATNEEVAEADAAVDAAQKQGLHDIQVVKSKQEVADTKSKVLDKINAIQTQAKVKPAADTEVENAYNTRKQEIQNSNASTTEEKQAAYTELDTKKQEARTNLDAANTNSDVTTAKDNSIAAINQVQAATTKKSDAKAEIAQKASERKTAIEAMNDSTTEEQQAAKDKVDQAVVTANADIDNAAANNDVDNAKTTNEATIAAITPDANVKPAAKQAIADKVQAQETAIDGNNGSTTEEKAAAKQQVQTEKTTADAAIDAAHTNAEVEAAKKAAIAKIEAIQPATTTKDNAKEAIATKANERKTAIAQTQDITAEEIAAANADVDNAVTQANSNIEAANSQNDVDQAKTTGENSIDQVTPTVNKKATARNEITAILNNKLQEIQATPDATDEEKQAADAEANTENGKANQAISAATTNAQVDEAKANAEAAINAVTPKVVKKQAAKDEIDQLQATQTNVINNDQNATTEEKEAAIQQLATAVTDAKNNITAATDDNGVDQAKDAGKNSIQSTQPATAVKSNAKNDVDQAVTTQNQAIDNTTGATTEEKNAAKDLVLKAKEKAYQDILNAQTTNDVTQIKDQAVADIQGITADTTIKDVAKDELATKANEQKALIAQTADATTEEKEQANQQVDAQLTQGNQNIENAQSIDDVNTAKDNAIQAIDPIQASTDVKTNARAELLTEMQNKITEILNNNETTNEEKGNDIGPVRAAYEEGLNNINAATTTGDVTTAKDTAVQKVQQLHANPVKKPAGKKELDQAAADKKTQIEQTPNASQQEINDAKQEVDTELNQAKTNVDQSSTNEYVDNAVKEGKAKINAVKTFSEYKKDALAKIEDAYNAKVNEADNSNASTSSEIAEAKQKLAELKQTADQNVNQATSKDDIEVQIHNDLDNINDYTIPTGKKESATTDLYAYADQKKNNISADTNATQDEKQQAIKQVDQNVQTALESINNGVDNGDVDDALTQGKAAIDAIQVDATVKPKANQAIEVKAEDTKESIDQSDQLTAEEKTEALAMIKQITDQAKQGITDATTTAEVEKAKAQGLEAFDNIQIDSTEKQKAIEELETALDQIEAGVNVNADATTEEKEAFTNALEDILSKATEDISDQTTNAEIATVKNSALEQLKAQRINPEVKKNALEAIREVVNKQIEIIKNADADASAKEIARTDLGRYFDRFADKLDKTQTNAEVAELQNVTIPAIEAIVPQNDPDANDTNNGIDNNDATANSNANATPENTGQPNVSETTANGKADASPTTPNNSDAATGETTATSATDDANDKPQANNNSSVDASTNSPTMDNDVTSKPEVESTNNGTTDKPVTETDNATPAESTTNNNSTTTATNENAPTGSTATAPTTASTEAASSADSKDNASVNDSKQNAEVNNSAESQSTNDKVAQPKSENKAKAEKDGSDSTNQSMVESTTETLPSADITEPNVPSNTSKDKEESTTNQTDAGQLKSETNVASNEADKSPSKADTEVSNKPSTSASSEAKEKMTSTNLSQKDDTATADTNDTQKSVGSAANNKATQNDGANASPATVSNGSNSANQDMLNVTNTDDHQAKTKSAQQGKVNKAKQQAKTLPDTGMSHNDDLPYAELALGAGMAFLIRRFTKKDQQTEE

SEQ ID NO: 221 - protein, 141 aa, Staphylococcus aureus
MKLKSFVTATLALGLLSTVGAALPSHEASADSNNGYKEMTVDGYHTVPYTISVDGITALHRTYFIFPENKNVLYQEIDSKVKNELASQRGVTTEKINNAQTATYTLTLNDGNKKVVNLKKNDDAKNSIDPSTIKQIQIVVK

SEQ ID NO: 222 - protein, 277 aa, Staphylococcus aureus
MAIKKYKPITNGRRNMTSLDFAEITKTTPEKSLLKPLPKKAGRNNQGKLTVRHHGGGHKRQYRVIDFKRNKDGINAKVDSIQYDPNRSANIALVVYADGEKRYIIAPKGLEVGQIVESGAEADIKVGNALPLQNIPVGTVVHNIELKPGKGGQIARSAGASAQVLGKEGKYVLIRLRSGEVRMILSTCRATIGQVGNLQHELVNVGKAGRSRWKGIRPTVRGSVMNPNDHPHGGGEGRAPIGRPSPMSPWGKPTLGKKTRRGKKSSDKLIVRGRKKK

SEQ ID NO: 223 - protein, 532 aa, Staphylococcus aureus
MLVNTFNPFDNLLLSSLIAAIPIVLFLLCLTVFKMKGIYAAITTLVVTLLIAIPFFKLPVGIASGAVVEGFFQGIIPIGYIVMMAVLLYKITVESGQFLTIQDSITNISQDQRIQVLLIGFAFNAFLEGAAGFGVPIAICALLLTQLGFNPLKAAMLCLVANAASGAFGAIGIPVGVVETLKLPGDVSVLGVSQSATLTLAIINFIIPFLLIFIIDGFRGVKETLPAILVVSITYTLTQGLLTVFSGPELADIIPPLLTMLALAVFSKKFQPKHIYRVNKDEEIEPAKAHSAKAVLHAWSPFIVLTVIVMIWSAPFFKNLFLPNGALSSLVFKFNLPGTISEVTHKPLVLTLNIIGQTGTAILLTIIITILMSKKVNFKDAGRLFGVTFKELWLPVLTICFILAISKITTYGGLSAAMGQGIAKAGNVFPVLSPILGWIGVFMTGSVVNNNSLFAPIQASVAQQIGTSGSLLVSANTVGGVAAKLISPQSIAIATAAVKQVGKESELLKMTLKYSVCLLIFICIWTFILSLL

SEQ ID NO: 224 - protein, 315 aa, Staphylococcus aureus
MLKNKILTTTLSVSLLAPLANPLLENAKAANDTEDIGKGSDIEIIKRTEDKTSNKWGVTQNIQFDFVKDKKYNKDALILKMQGFISSRTTYYNYKKTNHVKAMRWPFQYNIGLKTNDKYVSLINYLPKNKIESTNVSQILGYNIGGNFQSAPSLGGNGSFNYSKSISYTQQNYVSEVEQQNSKSVLWGVKANSFATESGQKSAFDSDLFVGYKPHSKDPRDYFVPDSELPPLVQSGFNPSFIATVSHEKGSSDTSEFEITYGRNMDVTHAIKRSTHYGNSYLDGHRVHNAFVNRNYTVKYEVNWKTHEIKVKGQN

SEQ ID NO: 225 - protein, 325 aa, Staphylococcus aureus
MKMNKLVKSSVATSMALLLLSGTANAEGKITPVSVKKVDDKVTLYKTTATADSDKFKISQILTFNFIKDKSYDKDTLVLKATGNINSGFVKPNPNDYDFSKLYWGAKYNVSISSQSNDSVNVVDYAPKNQNEEFQVQNTLGYTFGGDISISNGLSGGLNGNTAFSETINYKQESYRTTLSRNTNYKNVGWGVEAHKIMNNGWGPYGRDSFHPTYGNELFLAGRQSSAYAGQNFIAQHQMPLLSRSNFNPEFLSVLSHRQDGAKKSKITVTYQREMDLYQIRWNGFYWAGANYKNFKTRTFKSTYEIDWENHKVKLLDTKETENNK

SEQ ID NO: 226 - protein, 336 aa, Staphylococcus aureus
MNREMLYLNRSDIEQAGGNHSQVYVDALTEALTAHAHNDFVQPLKPYLRQDPENGHIADRIIAMPSHIGGEHAISGIKWIGSKHDNPSKRNMERASGVIILNDPETNYPIAVMEASLISSMRTAAVSVIAAKHLAKKGFKDLTIIGCGLIGDKQLQSMLEQFDHIERVFVYDQFSEACARFVDRWQQQRPEINFIATENAKEAVSNGEVVITCTVTDQPYIEYDWLQKGAFISNISIMDVHKEVFIKADKVVVDDWSQCNREKKTINQLVLEGKFSKEALHAELGQLVTGDIPGREDDDEIILLNPMGMAIEDISSAYFIYQQAQQQNIGTTLNLY

SEQ ID NO: 227 - protein, 381 aa, Staphylococcus aureus
MKKIMVIFGTRPEAIKMAPLVKEIDHNGNFEANIVITAQHRDMLDSVLSIFDIQADHDLNIMQDQQTLAGLTANALAKLDSIINEEQPDMILVHGDTTTTFVGSLAAFYHQIPVGHVEAGLRTHQKYSPFPEELNRVMVSNIAELNFAPTVIAAKNLLFENKDKERIFITGNTVIDALSTTVQNDFVSTIINKHKGKKVVLLTAHRRENIGEPMHQIFKAVRDLADEYKDVVFIYPMHRNPKVRAIAEKYLSGRNRIELIEPLDAIEFHNFTNQSYLVLTDSGGIQEEAPTFGKPVLVLRNHTERPEGVEAGTSRVIGTDYDNIVRNVKQLIEDDEAYQRMSQANNPYGDGQASRRICEAIEYYFGLRTDKPDEFVPLRHK

SEQ ID NO: 228 - protein, 2391 aa, Staphylococcus aureus
MIMGNLRFQQEYFRIYKNNTESTTHRNAYWVKLAKNVEATKMMYALSTIVQQHASIRHFFDVTTDDNLTMILHEFLPFIEIKQVPSSSANYDLEAFFKQELSTYHFNDSPLFKVKLFQFADAAYILLDFHVSIFDDSQIDIFLDDLCNAYRGNTVINNTRQHAHINRNDDKDNQDASHIALDSNYFRLENNSDIHIDSYFPIKHPFEQALYQTYLIDDMTSIDMASLAVSVYLANHIMSQQHDVTLGIHVPSHLPNDLHGNIVPLTLTIDAKDVCQRFTTDFNKCVLQNMSQLQCAKSSLSLETIFHCYHHMMSCCNDVIEDVHQIHDAHTSLADIEIFPHQHGFKIIYNSAAYDLLSIETLSDLVRNIYLQITEENGNKRTTVDELNLMTERDIQLYDDINLSLPEIDDAQTVVTLFEQQVEATPNHVAVQFDGVFITYQTLNARANDLAHRLRNQYGVEPNDRVAVIAEKSIEMIIAMIGVLKAGGAYVPIDPNYPSDRQEYILKDVTPKVVITYQALYENGKQNINHIDLNKIAWKNIDNLSKCNTLEDHAYVIYTSGTTGNPKGTLIPHRGIVRLVHQNHYVPLNEETTILLSGTIAFDAATFEIYGALLNGGKLIVAKKEQLLNPIAVEQLINENDVNTMWLTSSLFNQIASERIEVLVSLKYLLIGGEVLNAKWVDLLNQKPKHPQIINGYGPTENTTFTTTYNIPNKVPNRIPIGKPILGTHVYIMQGERRCGVGIPGELCTSGFGLAAGYLNQPELTADKFIKDSNINQLMYRSGDIVRLLPDGNIDYLYRKDKQVKIRGFRIELSEVEHALERIQGINKAVVIVQNHDQDQYIVAYYEAMHTLSHNKIKSQLRMTLPEYMIPVNFMHIEQIPITINGKLDKKALPIMDYVDTDAYVAPSTDTEHLLCQIFADILHVNQVGIHDNFFELGGHSLKATLVVNRIEASTGKRLQIGDLLQKPTVFELAQAIAKVQEQNYEVIPETIVKDDYVLSSAQKRMYLLWKSNHKDTVYNVPFLWRLSSELNVAQLRQAVQRLIARHEILRTQYIVVDDEVRQRIVADVAVDFEEVNTHFTDEQEIMRQFVAPFNLEKPSQIRVRYIRSPLHAYLFIDTHHIINDGMSNIQLMNDLNALYQHKLLLPLKLQYKDYSEWMSHRDMTKHRQYWLSQFKDEVPILSLPTDYVRPNIKTTNGAMMSFTMNQQMRQLLQKYVEKHQITDFMFFMSVVMTLLSRYARKDDVVVGSVMSARMHKGTEQMLGMFANTLVYRGQPSPDKMWTQFLQEVKEMSLEAYEHQEYPFECLVNDLDQSHDASRNPLFDVMLVLQNNETNHAHFGHSKLTHIQPKSVTAKFDLSFIIEEDRDDYTINIEYNTDLYHSETVRHMGNQCMIMIDYILKHQDTLQICDIPNGTEELLNWVNTHVNDRMLNVPGNKSIISYFNEVVSRQGNHVALVMNDLTMTYETLRNYVDAIAHMLLSNGVGNGQRVALFTERSFEMIAAMLATVKVGASYIPIDIDFPNKRQGAILEDAKVTAVMSYGVEIETTLPVIQLENAKGFVESKENEQYDDLHGNQLENTAMLDNEMYAIYTSGTTGMPKGVAIRQRNLLNLVHAWSTELQLGDNEVFLQHANIVFDASVMEIYCCLLNGHTLVIPDREERVNPEQLQQLINKHRVTVASIPLQMCSVMEDFYIEKLITGGATSTASFVKYIEKHCGTYFNAYGPSESTVITSYWSHHCGDLIPETIPIGKPLSNIQVYIMSDGLLCGIGMPGELCIAGDSLAIGYINRPELMADKWQNNPFGKGKLYHSGDLARYTSDGQIEFLGRIDKQVKVNGYRIELDEIENAILAIRGISDCVVTVSHFDTHDILNAYYVGEQQVEQDLKQYLNDQLPKYMIPKTITHIDCMPLTTNDKVDTTRLPNPSPIQQSNKVYSEPSNEIEQTFVDVFGEVLKQNDVGVDDDFFELGGNSLEAMLVVSHLKRFGHHISMQTLYQYKTVRQIVNYMYQNQQSLVALPDNLSELQKIVMSRYNLGILEDSLSHRPLGNTLLTGATGFLGAYLIEVLQGYSHRIYCFIRADNEEIAWYKLMTNLNDYFSEETVEIMLSNIEVIVGDFECMDDVVLPENMDTIIHAGARTDHFGDDDEFEKVNVQGTVDVIRLAQQHHARLIYVSTISVGTYFDIDTEDVTFSEADVYKGQLLTSPYTRSKFYSELKVLEAVNNGLDGRIVRVGNLTNPYNGRWHMRNIKTNRFSMVMNDLLQLDCIGVSMAEMPVDFSFVDTTARQIVALAQVNTPQIIYHVLSPNKMPVKSLLECVKRKEIELVSDESFNEILQKQDMYETIGLTSVDREQQLAMIDTTLTLKIMNHISEKWPTITNNWLYHWAQYIKTIFNK

SEQ ID NO: 229 - protein, 484 aa, Staphylococcus aureus
MTKEQQLAERIIAAVGGMDNIDSVMNCMTRVRIKVLDENKVDDQELRHIDGVMGVIHDERIQVVVGPGTVNKVANHMAELSGVKLGDPIPHHHNDSEKMDYKSYAADKAKANKEAHKAKQKNGKLNKVLKSIANIFIPLIPAFIGAGLIGGIAAVLSNLMVAGYISGAWITQLITVFNVIKDGMLAYLAIFTGINAAKEFGATPGLGGVIGGTTLLTGIAGKNILMNVFTGEPLQPGQGGIIGVIFAVWILSIVEKRLHKIVPNAIDIIVTPTIALLIVGLLTIFIFMPLAGFVSDSLVSVVNGIISIGGVFSGFIIGASFLPLVMLGLHHIFTPIHIEMINQSGATYLLPIAAMAGAGQVGAALALWVRCKRNTTLRNTLKGALPVGFLGIGEPLIYGVTLPLGRPFLTACIGGGIGGAVIGGIGHIGAKAIGPSGVSLLPLISDNMYLGYIAGLLAAYAGGFVCTYLFGTTKAMRQTDLLGD

SEQ ID NO: 230 - protein, 423 aa, Staphylococcus aureus
MSKILKCITLAVVMLLIVTACGPNRSKEDIDKALNKDNSKDKPNQLTMWVDGDKQMAFYKKITDQYTKKTGIKVKLVNIGQNDQLENISLDAPAGKGPDIFFLAHDNTGSAYLQGLAAEIKLSKDELKGFNKQALKAMNYDNKQLALPAIVETTALFYNKKLVKNAPQTLEEVEANAAKLTDSKKKQYGMLFDAKNFYFNYPFLFGNDDYIFKKNGSEYDIHQLGLNSKHVVKNAERLQKWYDKGYLPKAATHDVMIGLFKEGKVGQFVTGPWNINEYQETFGKDLGVTTLPTDGGKPMKPFLGVRGWYLSEYSKHKYWAKDLMLYITSKDTLQKYTDEMSEITGRVDVKSSNPNLKVFEKQARHAEPMPNIPEMRQVWEPMGNASIFISNGKNPKQALDEATNDITQNIKILHPSQNDKKGD

SEQ ID NO: 231 - protein, 347 aa, Staphylococcus aureus
VKALKLYGVEDLRYEDNEKPVIESANDVIIKVRATGICGSDTSRYKKMGPYIKGMPFGHEFSGVVDAIGSDVTHVNVGDKVTGCPAIPCYQCEYCLKGEYARCEKLFVIGSYEPGSFAEYVKLPAQNVLKVPDNVDYIEAAMVEPSAVVAHGFYKSNIQPGMTVAVMGCGSIGLLAIQWARIFGAAHIIAIDIDAHKLDIATSLGAHQTINSKEENLEKFIENHYANQIDLAIESSGAKVTIGQILTLPKKGGEVVLLGIPYDDIEIDRVHFEKILRNELTVCGSWNCLSSNFPGKEWTATLHYMKTKDINVKPIISHFLPLEKGPETFDKLVNKKERFDKVMFTIY

SEQ ID NO: 232 - protein, 263 aa, Staphylococcus aureus
MQALQTFNFKELPVRTVEIENEPYFVGKDIAEILGYARSDNAIRNHVDSEDKLTHQFSASGQNRNMIIINESGLYSLIFDASKQSKNEKIRETARKFKRWVTSDVLPAIRKHGIYATDNVIEQTLKDPDYIITVLTEYKKEKEQNLLLQQEIGELKPKADYVDEILKSTGTLATTQIAADYGISAQKLNKLLHEARLQRKVNKQWVLYSEHMGKSYTESDTIAIVRSDGREDTVLQTRWTQKGRLKIHEIMTEFGYEANLGGA

SEQ ID NO: 233 - protein, 190 aa, Staphylococcus aureus
MKLKSLAVLSMSAVVLTACGNDTPKDETKSTESNTNQDTNTTKDVIALKDVKTSPEDAVKKAEETYKGQKLKGISFENSNGEWAYKVTQQKSGEESEVLVADKNKKVINKKTEKEDTMNENDNFKYSDAIDYKKAIKEGQKEFDGDIKEWSLEKDDGKLVYNIDLKKGNKKQEVTVDAKNGKVLKSEQDH

SEQ ID NO: 234 - protein, 231 aa, Staphylococcus aureus
MKMKNIAKISLLLGILATGVNTTTEKPVHAEKKPIVISENSKKLKAYYNQPSIEYKNVTGYISFIQPSIKFMNIIDGNSVNNIALIGKDKQHYHTGVHRNLNIFYVNEDKRFEGAKYSIGGITSANDKAVDLIAEARVIKEDHTGEYDYDFFPFKIDKEAMSLKEIDFKLRKYLIDNYGLYGEMSTGKITVKKKYYGKYTFELDKKLQEDRMSDVINVTDIDRIEIKVIKA

SEQ ID NO: 235 - DNA, 681 bp, Staphylococcus aureus
ttgaaaaatattttaaaagtttttaatacaacgattttagcgttaattatcatcatcgcgacattcagtaattctgcaaatgccgcagatagcggtactttgaattatgaggtttacaaatacaataccaatgacacgtcaattgctaatgactattttaataaaccggcaaagtacattaagaaaaatggtaaattgtatgttcaaataactgtcaaccacagtcattggattactggaatgagtatcgaaggacataaagaaaatattattagtaaaaacactgccaaagatgaacgcacttctgaatttgaagtaagtaagttgaacggtaaaatagatggaaaaattgacgtttatatcgatgaaaaagtaaatggaaagccattcaaatatgaccatcattacaacattacatataaatttaatggaccaactgatgtagcaggtgctaatgcaccaggtaaagatgataaaaattctgcttcaggtagtgacaaaggatctgatggaacgactactggtcaaagtgaatctaatagttcgaataaagacaaagtagaaaatccacaaacaaatgctggtacacctgcatatatatatacaataccagttgcatccttagcattattaatcgcaatcacattgtttgttagaaaaaaatctaaaggcaatgtggaa

SEQ ID NO: 236 - DNA, 1050 bp, Staphylococcus aureus
atgacaaaacattatttaaacagtaagtatcaatcagaacaacgttcatcagctatgaaaaagattacaatgggtacagcatctatcattttaggttcccttgtatacataggcgcagacagccaacaagtcaatgcggcaacagaagctacgaacgcacctaataatcaaagcacacaagtttctcaagcaacatcacaaccaattaatttccaagtgcaaaaagatggctcttcagagaagtcacacatggatgactatatgcaacaccctggtaaagtaattaaacaaaataataaatattatttccaaaccgtgttaaacaatgcatcattctggaaagaatacaaattttacaatgcaaacaatcaagaattagcaacaactgttgttaacgataataaaaaagcggatactagaacaatcaatgttgcagttgaacctggatataagagcttaactactaaagtacatattgtcgtgccacaaattaattacaatcatagatatactacgcatttggaatttgaaaaagcaattcctacattagctgacgcagcaaaaccaaacaatgttaaaccggttcaaccaaaaccagctcaacctaaaacacctactgagcaaactaaaccagttcaacctaaagttgaaaaagttaaacctactgtaactacaacaagcaaagttgaagacaatcactctactaaagttgtaagtactgacacaacaaaagatcaaactaaaacacaaactgctcatacagttaaaacagcacaaactgctcaagaacaaaataaagttcaaacacctgttaaagatgttgcaacagcgaaatctgaaagcaacaatcaagctgtaagtgataataaatcacaacaaactaacaaagttacaaaacataacgaaacgcctaaacaagcatctaaagctaaagaattaccaaaaactggtttaacttcagttgataactttattagcacagttgccttcgcaacacttgcccttttaggttcattatctttattacttttcaaaagaaaagaatctaaa

SEQ ID NO: 237 - protein, 227 aa, Staphylococcus aureus
LKNILKVFNTTILALIIIIATFSNSANAADSGTLNYEVYKYNTNDTSIANDYFNKPAKYIKKNGKLYVQITVNHSHWITGMSIEGHKENIISKNTAKDERTSEFEVSKLNGKIDGKIDVYIDEKVNGKPFKYDHHYNITYKFNGPTDVAGANAPGKDDKNSASGSDKGSDGTTTGQSESNSSNKDKVENPQTNAGTPAYIYTIPVASLALLIAITLFVRKKSKGNVE

SEQ ID NO: 238 - protein, 350 aa, Staphylococcus aureus
MTKHYLNSKYQSEQRSSAMKKITMGTASIILGSLVYIGADSQQVNAATEATNAPNNQSTQVSQATSQPINFQVQKDGSSEKSHMDDYMQHPGKVIKQNNKYYFQTVLNNASFWKEYKFYNANNQELATTVVNDNKKADTRTINVAVEPGYKSLTTKVHIVVPQINYNHRYTTHLEFEKAIPTLADAAKPNNVKPVQPKPAQPKTPTEQTKPVQPKVEKVKPTVTTTSKVEDNHSTKVVSTDTTKDQTKTQTAHTVKTAQTAQEQNKVQTPVKDVATAKSESNNQAVSDNKSQQTNKVTKHNETPKQASKAKELPKTGLTSVDNFISTVAFATLALLGSLSLLLFKRKESK

SEQ ID NO: 239 - DNA, 5610 bp, Staphylococcus epidermidis
atgacaaagaaagaaaaggattataaaaaaagtcttgagcaacaaaaaacacgggtaaaaatatacaagtcaggaaaaagctgggtaaaagcaagtattaatgaaatagaattgttaaaaacaatggggctaccatttttaagtaaaaacgaaatacaagaaaatgtgactgaaaagacgaaaggtcataaattaaaaaaaagtgcagctaaaacaacagccctagttggtggagcatttacatttaatatgttgaataatcatcaagcatttgctgcctcagaaacaccaatcacctctgaaatttcatccaatagtgagacagtagccaatcaaaattcaactacgattaagaactcacaaaaagaaacagtcaattctacaagtttggaatctaaccattctaatagtacaaataagcaaatgtcttcagaagttacaaatacagctcaatccagtgaaaaagctggaattagtcaacaaagtagtgaaacatcaaatcaatcatctaagttaaatacatatgcctccacagaccatgtagagagtacaactattaacaatgataatactgcacaacaagatcaaaataagtcttcgaatgtaacctctaagtcaacacaatcaaacacgtcatcctcagaaaagaacattagctccaatttaacccagtcaatcgaaacaaaagcaaccgattcattagcgactagtgaagcacgtactagtacaaatcaaatatctaatctgacatcaacatctacttcgaatcaatcgagtcctacttcctttgcaaatttaagaacatttagtagatttactgttttgaatacgatggcagcaccgacaacaacatcaacgacaacaacttcaagtctgacatctaattctgttgtggtgaacaaagataactttaatgaacatatgaatctatctggatctgcgacgtatgatcctaaaacaggtattgctaccttaacgccagacgcatatagtcaaaagggtgccatatctttaaacactcgattagattcaaaccgtagcttccgttttataggtaaagttaaccttggtaatagatatgaaggttattctcctgatggtgtagcaggtggagatggcattggctttgcattttcaccaggccctttaggacagataggtaaagaaggggctgccgttggaataggcggtttgaataatgcctttggttttaaattggatacgtatcataacacatcaactcctagatctgatgctaaagcaaaagcagatccacgtaatgttggtggtggtggtgcttttggtgccttcgtaagtacagatagaaatggtatggctaccactgaggaatcaactgcggctaaattaaatgtacaacctactgacaattcattccaagattttgtcattgactataatggtgatacaaaagtgatgacagtgacgtacgctggacaaacctttacgagaaatcttacagattggataaaaaacagtgggggtacgacgttttctctatctatgactgcctcaactggtggcgcaaaaaatttacaacaagttcaatttggaacattcgagtatacagaatcagctgttgctaaagtacgctatgtagatgcaaatactggtaaggatattatcccgcctaaaaccattgcaggtgaagttgacgggactgtaaatatagataaacaattgaacaattttaaaaatttaggttacagttatgtggggacagatgccttaaaagcaccaaattatacagaaacgtcaggtacacctacacttaaattaactaactcaagccaaacggtgatttataaattcaaagatgttcaaggtcctcaaattagtgttgatagtcaaactagagaagttggaaagaccattaatccaattacaattactacaactgacaatagtaaagacgtattaactacaactgtgacaggtctaccttcagggttatcttttgatcaaacgactaatacaattattggcacgccaagtgaagtaggaactacaactgtgacagttaatactactgatgctactgggaacgtaacatctaagcaatttacaataacgattcaagatacaatcagccctgttgtaaatgtgacgccaagtcaagcatcagaggttttcacgccgattaatccaattacgataactgctacagataatagtggcaaagtggtaacgcatacagtaactggattgccacaaggacttaaatttgatgcatctacgaattcaattgttggaactccaactcaaataggaacaaatacaatcacgattgagtcaacggatgcgagtggaaataaaactacgactaaaattaattatgaagtaacgagaaatagcgcaagtgactctacttccactagcatagtaaatagtgtttcaacaagtataagtaatagtacatcgctaagtgatagtgtaaaagcgagtcaatcattatcaacaaaagaatcaacaagtaagagtctctcaggttcgttaagtgcgtcaacgtcgaatagtgcatcaataaaagcgagtgaatcagcaagcacaagtaagaagttatcagaatcagcgagtacgtcgatgtctgatagcgcatcaataaaagcgagcgaatcagcaagtacaagtaagaagttatcagaatcagcgagtacgtcaacgtctgatagcgcatcaataaaagcaagcgaatcagcaagtacaagtaagaagttatcagaatcagcgagtacgtcgatgtctgatagcgtatcaataaaagcgagcgaatcagcgagtacaagtaagaagttatcagaatcagcgagtacgtcgacgtctgatagcgcatcaacccaagcaagcgaatcagcaagtacaagtaaaaagttatcagaatcaacgagtacgtcgacttcagatagtgcatcaacatcaacgagtgagagtgactcaacaagtgaaagtacatcgttaagtgactcgacaagtgcgagtctttcagaatcgacaagtacatcaacatccgacagtgcgtccacatcaacgagtgagagtgactcaaacagtacaagtacgtcattgagtgagtcgacaagcacaagtctttcagaatcaacgagtacgtcaacatcagatagtgcgtcaacgtcagcaagtgtgagtgactccaatagcgcaagtacgtcattaagagaatcgacaagtacgagtctttcagactcaacaagtacatcgacatctgacagtgcgtcaacatcaacgagcgagagcgactccgatagcgcaagtacatcgttgagtggctcatcaagtacaagcgtttcagattcaacaagcgcgtcaacatcagaaagtgcatcaacgtcaacgagcataagtgactcaaacagtacaagtacgtcattaagtgaatcgacaagtacgagtctttcagaatcaacgagtacgtctacatccgacagtgcatccacatcaatgagtgtaagcgactcaaatagtgccagcatatctttaagtgagtcgacaagcacaagcgtttcagattcaacaagtacatcgacatcagaaagtgcatcaacgtcaacgagcgagagtgactccaatagcgcaagtacgtcattaagtgagtcgacaagcacaagcgtttcagattcaacaagcacatcgacatcagacagtgcgtcaacatcaacgagcgtaagtgattccaatagcgcaagtacgtcattgagtgagtcgacaagcacaagcatctcagattcaacaagcacgtcgacatcagacagtgcgtcaacatcaacaagtgtgagtgagtcaagcagtacaagtaagaagttatcagaatcagcgagtacgtcgatgtctgatagcgcatctgcatcaacgagtgaatcaaacagtacaagtacgtcattaagtggctcgacaagtacgagtctttcaggatcaacgagtacatcgacttcagaaagtgcgtcaacatcaacgagcgtaagtgactccaatagcgcaagtacgtcattaagtgaatcgacaagtacgagtctttcagactcaacgagtacatcgacatcagatagtacgtctgcatcaacaagtgagagtgactcaaacagtacaagcacatccatgagtgaatcattaagcacaagcgtttcagattcaacaagtacgtcaacgtcagacagtgcatcaacgtcaacaagtgtgagtgactccaatagcgcaagtacgtcattaagtgattcaacaagtacaagcatttcagactcaacgagtgcgtcgacatcagatagtgcgtcagagtcagcaagcgagagtgaatcaacaagtgaaagtacatcggtaagtgaatcatcaagtacaagcgtttcagattcaacaagtacatcgacatcagaaagtgcatcaacgtcaacaagcgagagtgaatcaacaagtgaaagtacatcggtaagtgaatcatcaagtacaagcgtttcagattcaacaagtacatcgacatcagaaagtgcatcaacgtcaacaagcgagagtgaatcaacaagtgaaagtacgtcattaagtggatcatcaagtacaagcgtttcagattcaacaagtacgtcaacgtcagaaagtgcatcaacgtcaacgagtgtgagcgactcaaatagtacaagtacgtcattaagtgaatcgacaagtacgagtctttcaaactcaacaagtacgtcaacatcagacagtgcatcaacgtcaacgagtgtgagcgactccaatagcgcaagtacatcgttgagtggctcattaagcacaaacgtttcagattcaacaagcacatcgacatcagacagtgcttcaacgtcaacaagcgagagtgactcgaacagtgcaagcacatcgctaagtggatcattaagtacaagcatttcagactcaacgagtacgtcgacatcagacagtgcgtccacatccacatcagaaagtgcatccacatcaacgagtgtgagtgagtcagacagtgaaagtacatccatgagtgtgagtgactcgaatagtacaagtacatcattgagtgactcgacaagtacgagcgtttcagactcaacaagaacatcaacatccgatagtgcatctacatcaaagagtgtaagtgagtcaaacagcgccagtacatcggtaagtggctcaacaagtacaagcatttcagattcatcaagcacgtccacatcaatgagtacatctgaaactttcacttctcaatctcctataaatagtgaaagtcaatttattggtgatagcttgtctgaagatacaatcgtgactcaatcaaaaaatacgaatatgcttaataaaactggaaaagattatgatttacaagaacaaagaggttatactgattcagaacaacacaatgaaacacaaagtaatcaagctgataatcactcaaacaacctcgatttacttcatcaaaatcgtttacaagataaagtcgttaaacaaccgactaaaggagaagatggagttgtaagcaacggttttatagtagcagtagcaatagtattggctatcttcggtttggcaaaaaaatctagaaaagacgatgatgatcaagatggtagtaaa

SEQ ID NO: 240 - DNA, 706 bp, Staphylococcus epidermidis
atgaaaaaaacagttatcgcttctacattagcagtatctttaggaattgcaggttacggtttatcaggacatgaagcacacgcttcagaaactacaaacgttgataaagcacacttagtagatttagcacaacataatcctgaagaattaaatgctaaaccagttcaagctggtgcttacgatattcatttcgtagacaatggataccaatacaacttcacttcaaatggttctgaatggtcatggagctacgctgtagctggttcagatgctgattacacagaatcatcatcaaaccaagaagtaagtgcaaatacacaatctagtaacacaaatgtacaagctgtttcagctccaacttcttcagaaagtcgtagctacagcacatcaactacttcatactcagcaccaagccataactacagctctcacagtagttcagtaagattatcaaatggtaatactgctggttctgtaggttcatatgctgctgctcaaatggctgcacgtactggtgtatctgcttcaacatgggaacacatcattgctagagaatcaaatggtcaattacatgcacgtaatgcttcaggtgctgctggattattccaaactatgccaggttggggttcaactggttcagtaaatgatcaaatcaatgccgcttataaagcatataaagcacaaggtttatctgcttggggtatgt

SEQ ID NO: 241 - DNA, 921 bp, Staphylococcus epidermidis
atgaataaaaataaagtgattgtaattggatcaacaaatgtagataaatttcttaatgttaaaaggtttccaaaacccggtgagacattacatattaatcaagctcaaaaggagtttggtgggggcaagggagccaatcaagccatagcagctagtagattagcagcagatacaacatttatcagtaaagttggtaaagatggcaatgccaactttatattggaagatttcaaaaaagcaggtattcatacacaatatattttaacttcagaaagtgaagaaactgggcaagcatttatcactgttgatgaagcaggacaaaatacgattcttgtttacggtggtgcgaatatgacattaagtgcaactgatgttgagatgagtgtggatgcgtttattggtgcagactttgttgtagcgcagcttgaagttccatttgaggcgatagaacaagcatttaaaattgctcgtaaacaaaatatcactactgtattaaatcctgcaccggcaattgaattgcctaagtcacttttagagttaactgatataattattccaaacgaaacggaagcagaattattaacaggtatttcaatcaataatgaaagtgatatgaaagaaacagcaacatattttctcgatttaggtatatctgcagtattaattactttaggggagcaaggcacgtattgtgcatatcaagaacaatacaaaatgattcctgcgtgtaatgtaaaagcaatagatacgacagcagcaggagatacatttataggtgcttttttaagtgagttaaataaagatttgagcaatttagaatcggctattcgacttgcaaatcaagcgtcgtctctaacggtacaacgaaaaggagcacaagcttctataccaacacgtaaagaagtagaggcagaatataat

SEQ ID NO: 242 - DNA, 831 bp, Staphylococcus epidermidis
atggctcttaaaaaatataagccaattacaaatggtcgtcgtaatatgactactttagatttcgctgaaatcacaaaaacaacacctgaaaagtcattattacaaccgctaccgaaaagagcgggacgcaataaccaaggtaaattgactgttcgccatcatggtggtggacacaaacgtcaataccgtgttatcgattttaaacgtaacaaagatggaatcattgctaaagttgattcaattcaatatgatccaaaccgttcagcaaacattgcattgctagtttatgctgatggtgaaaaaagatatatcatcgcacctaaaggattacaagtaggtcaaactgtcgaaagtggtgctgaggcagatatcaaagttggtaatgctttaccattacaaaatattccagttgggacagtaattcataacatcgagttaaaacctggtaaaggtggacaacttgctcgttctgctggtgctagctctcaagtattaggtaaagaaggtaaatatgtattaatcagattaagatctggtgaagtacgtatgattttatctacatgtcgtgcaacaattggtcaagttggcaacttacaacatgaattagtaaatgttggtaaagcaggacgctctagatggaaaggcgttcgcccaactgtacgtggttctgtaatgaaccctaatgatcacccacacggtggtggtgaaggtcgtgctccaatcggtagaccatctccaatgtcaccatggggtaaacctacgcttggtaagaaaactcgtcgtggtaaaaaatcttctgacaaacttatcgttcgtggacgtaagaaaaaa

SEQ ID NO: 243 - DNA, 864 bp, Staphylococcus epidermidis
atgaagtcaaaattcacaattctattatttacaatcttttctacaacagtattagttttggttattatttataacaaaactcaatcccaatcatacatttcgactcactattctaataataaaataaaaacaacagcaacactttttttacatggttatggtggtagcgaacgctcagaaacgtttatggtcaaacaagcgttaaataaaaatgtaaccaatgaggtgataaccgctagagtgagtagtgaaggaaaagtatattttgataaaaaattaagtgaagatgcagcaaaccctattgtcaaagtagaatttaaagataataaaaatggaaattttaaagaaaatgcttattggattaaagaagttctatcacaactaaaaagtcaatttggaattcaacaatttaattttgtaggacattcaatggggaacatgtcatttgctttttacatgaaaaattatggggacgatcgacatttgccacaacttaaaaaggaagttaatatagcgggagtttataacgggattttgaatatgaatgagaacgtgaatgaaattatcgttgataaacaggggaaaccaagtagaatgaatgccgcatatcggcaattgttatcactgcataagatttattgtggtaaggaaatagaagttttaaatatctacggagatttagaagatggctcacattcagatggacgtgtgtcaaatagctcttctcaatcgcttcaatatttactaagaggtagcactaagtcttatcaagaaatgaaatttaaaggtgcaaaggcacaacatagtcaattacatgagaataaagatgttgcaaatgaaatcatacaattcttatgggaaact

SEQ ID NO: 244 - DNA, 795 bp, Staphylococcus epidermidis
atgaagattggaattgatgccggagggactttaattaaaattgtacaagagcatgacaatcgtagatattacagaactgaattaacaactaatatccaaaaagtcatagattggcttaacaatgaagaaatcgaaacattaaagcttacaggtggaaatgctggagtaatagcagatcaaattcatcattcccctgaaatatttgtagagttcgatgcatcatcaaaaggtttagaaattttattggatgaacaaggtcatcaaattgaacattacatttttgctaatgtaggtacaggtacttctttccactattttgatggaaaagaccagcaacgtgttggaggtgtaggtaccggaggcgggatgatacaaggtttaggctatttattgtccaatataacagattataaagaattaacgaatttagctcaaaatggagatcgtgatgccattgatttaaaagtaaaacatatttataaagatactgaaccaccaattcctggagatttaacagcagcaaattttggaaatgtattacatcacttagataatcagtttacatcagctaacaaacttgcctctgcaattggcgtcgttggtgaagttataacaactatggctattacattagcacgtgaatataagactaagcacgttgtatatatcggttcatcatttaataacaatcaattactacgtgaagttgttgaaaattacactgttctaagaggatttaaaccgtactatattgagaatggtgctttttcaggcgctttaggagcactttacctc

SEQ ID NO: 245 - DNA, 8043 bp, Staphylococcus epidermidis
atgactttaaataaccattttgcatatacatttgaggagagacctaccccaaaattatggctttgtaaaccagatggaactagaattgaaagaattgcagatttttcaaaacttggtggaacattcaaattcactaatgtgaacactttacattttgatttgccattgcaagtatttagtgaagatactaagcaaattgaaagaaataaagtagttgatttagtaaaaaataaatacttaattgattatagatataacggatatagagatatctttgtaattgatgatattaaaaaatctgctaatgactctgattttattacattaaatttagactcaagagcgtctgaattaaataagaaagctgcaaatgaaattgaattattaggttctactatccctcaaatgatgaacaaaatcttatcagtttatgctccactatggaaacttggacatgttgatggaaaaattattgatgttaaacgtgagttaactggttctaatacaactgttaacgctcttattgataatatttgttctctttttgacgcagttgctatttataacaacattaatagaacaataagcttctatcataaagacaatgttggtactaatcgtggtttaagagttagggaaaatagttatttaaaatcatttgaagatcaatttgtatcaaaggatatcgttactagattatatccatttggtcaaagtggtttaacaattcaaagtgttaacccagctggctcttcttatattgaagacttctcttatttcatgtcaccattcaaacgtgataataacagaaatgtattacaacatagtgattatatgtctgatgaattatgtcacgctttgttagattatcaagagttttatgctagtaagaaggatcaagctggtgaattatctaaacaatatagtgcaattcttaaagagcattcacaagaagacttcagattaaatcaattaagtgctacacttcaacgactaaatgagcgtgttgaattagttaaacctaaatcagaatatattgacttaggaacaaaggttaagaatttcaaaatcactgtacctaaatcatcatattatttaatcatgattagaaatgatggtagtttcactagaattaaattcaataataaacagtatgatattccaagtggtgagtggttgtatatcaaacttaaaactggtaagtttaatgacgctactaagtttgagaaacaattagaataccctcttgaaatattaagtgcaaacgctaatttaagagtggtatatactcgttcttctgaaggagattatgaagaagaagatactaagacaatcgaagaaaaatacaacttagaaaaatataaaattttagtaaaagatcaagaaaaagtagtcgcttcaatcgaaagacgattaaaagcttttgaagaccaaaaagcaagtgtaatacgttcaatgaatgcaaagaatttcttatctgaaaaactttataatgaacgtgagttatatgtttttgagtctgtttggacggaagaaaatcatacagacgctcaagaattatatgatgacgctgtaaaacaaatgaaggaacaaaagaaaatcaatagaacgattacagttgatttagttaacttcattcaatcgcttgaccataaagatgattgggataaattaaatgttggagataaagttgttttccaaaacaaaatcttcaatactaaaatcaaagcctatatcactgaaatgcaattagatttccaaactaatcaagtaaaaattactattagtgatatttttgattacaaagatttagacacaatcatcgctgaaaaattagcccaaactacctctacttcttctcaagttgatttccataaacaacaaattagagagcaaaccggaagaattacagatatgactcgtcttatcgaaggtgagtgggacgcaaataaaaagcgtgtgatggctggtaatgaaacagttgatattggttcacatggtgttaaagtcatttcaaaagagaaccctaacgaattcgtaatcatggttggtggcgtaattgctatgactcgtgataacggtgaaacatttaaaactggtattacaccagaaggtatcaatgctgaaatgcttatcggtaagatgatcgttggtgaaactttaacttttgaaaatgagtctggtacagttaaattcgacaaagatggactttatgttaactctaaaaacttccatttagtttcaaatgatggagaagaagactacttcgataaattaaaacgtgaaatgtctgaaaacgctaaacaacaaacagacagaatgttagaagagtataaaaaagaagtttcacaaactatttctgaagctactgacgttagaaacattgttgataatgcagcagatattcttcaagcagcttttgctgatggagttatcacagatgttgaaaaacgtttgatttctgaaactcttgctcaacttgaaaaagaaaatagagaattcgaagataaaattaacttagctttaaaccacccttacatcactgaggaagatactattgagttaaataattctatcgttgaatatagctcaatgtatgaaacacttgttatttctattaatgaaagtgttagtgacaagatgatcacacctcaagagtctgaagaaattaatcaaaatattataaacttcagagaagagatcaaagacatcttatcattagtagaagaaattattgaacgaactaaaaatgctcaactacaagctactttagaagaagcaaaagattatacaacaagagttcgtgacgatattaaagatgaattaaaagacttaaataattcatttaaatctttaaatagtacagttgaagagtcattacaagataatatttttgacgctgctgaattagaagctattaaaacagttgtattagtaactaaatcagaatatcaagatattacaaatagatattcttcaatgtctgcaaatacagatttaaaatcggaaagtaaattagatttaacaaaatcttataaaactttagatactagctttaatgactttgttaaatatattgacgaaatgacaatggatagaattgcagatgagactgagaaagttaattacaaaaagaaatatgatactttacaaaagaacttatcagattatatgaaaaaatatgataactgtattttggaaatatctaaaaagtattctaatgacgcagcagataaagtgttaggtgacttcacagctattgctactgaattacaaaatgatttccaagatgttaaagacaattgggctgaattcaagcaaactactcttgagtcatttaaagatggtatagtaactgaggcagaaaaagctcgactaagagtacaattagatatgcttgatcgtgaaagcatggatattgaagaacgatataaaagcttacttgctaaccaatatactaatactgatattaaaaatcgcttaactgcttcacgttctccttacttatcagttcatgctagtttaagaaaagtaattgaacaaataattgctgacggaaaagttgatgaaagtgaaaaaacattagctaataattcacttaatacatacaacacaacattaactgcttattctaaaacaattcaagaagctctaaatacattatcacaaatcatctcttctgatgtagcaagtaaaaaagttgaagaattcaatggtgtaataactacaatttcttcagacgttgatacaatcaagaaacaaagagatggtgcagtaatcacttattattatagcggtgtacctacattatctaacgatccagctaaaagttggacgactaatgatttaaaagacttacatattaaagatatgtatttagacactaaatctggttatgcatatactttcactaaatctggtactagttattcttggaaaccacttactgaccaagttattgttagctcattgaaacaagcaaaaaatgcacaagacacagcggacaataaacgtagagtttttgtaactcaacctattcctccttatgatcaaggagatatgtggactcaaggttcacaaggagatatttatgtctgtggaacttcgagagctactggctcattcgtaagtagcgactgggttaaagcgagcaaatacactgacgatacagtagctaaacaggcagcaaaagatttagaagattataaagtcaaaatgactaaagacttcaaagatttaaatgacggtgtatctacttttaaaactgaagtggttaaagatttcaaagatggaattgtaactgaagctgagaaaactagattacgtgttcaattagatatcttagatagagaaagtcaagatatcgaagaaagatataatagtatctttaacagtcaatatgcagatactcaagttaaaacttctatttctaacgcacgctctacttataataactctcttactaagttaagaaacactattcaaaccgtgattgaagatggaaaagtaacgcctactgagaaaactactgctaatcaaactttaaccgcatataataatgctttaacgagttattcagctgctatccaagaagcattaaatagcatgtcaaaagtaattgctcaaaaagaagctactagtcaagtaaatcaattcaatgaagttatcaaaaatataaatacaaatattactgatattcaaaaacaagttgatggtgcaattgaaactttctattacagtggagtaccaacacttactaatatccccgcttcgtattggacaactgctagtaaacgtgaagctcatttaggtgatttatatttagacactgctactggtgttgcttatcgtttcttaaaaaaaggaacaacttcccctacttactattggtctccaatttctgatcaaattattacagacgcattgaatagagcaaaaacagctcaagacaccgccgatggaaaaagaagagtttttgtaaatacacctgttccaccatacgacactggtgacatgtggacgcaaggagctagtggtgacatcttagtttgtaaaacacctaaagctaaaggtggtatttactcaataagcgactgggtaaaagctagtaagtatacagatgatacagtagcaaacagtgctgttcaacaattaaatgaatacaaacgcactaataatcttgatatcgcagacctaaagagaaaaactagtgacttcgaaaaaacagttgtaaatgcatttgacgatagagtcattagtatttccgagtcttcatctattaaaggacaacttgctctacttaatcacgaaaaagatagattaactagacaatacgaaaatataatcagaaattctaatcttgttggagcagaaaaaactaaattatctactgcatattcaaatataaatactaagcttagtgatttaagtacaactattaatagtgcaattgttgataataaaattgttgacgctgaaagtaaatctgtaacttcaaaatttgaattgtataaagcttcagttaatgaatatcaaatcgcttttgataatgctctaaactcaattattagagaaatcgcttcttcccaagctaaagatagattagatgaatggaaacgtacagaatttagtacagactcagacggtattattgaaagagtagctggtgctaagtttgactcaaaatggactgatacttggagaaatacagttaacccagctattcaacaagtgagtaatataacatatggaagtgaaaacctattacttaatagcgaaagtcgaagtgacggtgctaataccacgactcactcttttataagatactacctgacacgccctttagaaacagggaaaacttatactttaaaagctagtgttttaacaactgatgaaagacaaagtggacaaattagtgtttatccatactcccctaacggagcaagagagacagtaaatattaaagacggtaaaattacttatacatttactgcacaaactgaaagtacacaatttcttatttataaagacgtggctggtcaatctgatgtagacttaaatgtaacaatcgagaaggctattttagtcgaaggaaataaagttacagggtggtctccagcaccagaggagacttcttctgctttacgagattataatactcgtatctcctcagcagaaacattcattgagaaaaacaaagaaaagatttctcaaattgctactaaatctgatgttgacgcttcacttagtaaagtagctacttatgaaactcaatataatgtttctagcggaactaactatcaaattcctcttcaagaatacaatggttcattctttaccgacaactacacttatgaagttgtagctaaaaataactctttaagttctaacaacgtagcaactgctatattcgtaagtaaaggttcaaacaatggttatgaattggttgaattagacaacatgtctaaaactggtgctaaccctagatttgttttagacagtaaaggtagaccttctatctctactttctcccctcaatctactactcaagatatttcagttatttacactaaatatttaggtagtgcttcagcaatcaatacaactaaatcattgattgagcaaactgctagttctattgaattacaagttaagaaacttactgctgagactgaatacaacaacatattattaaattcagacttctcttctggctgggaaggttggataaatgttgatcctcagtatagtattgttgataaaaatacttttggtatcactcttcctgacgcaatcactaataaaaataagaaatataatacagttaaaatgacatacaataaaaatacaaattacccttctgtattttctaattttatttctgttggaaaaggtcaagaggtagctattggtgaacatttaacactaacttgttatgcctatatcccttcttcatctaaaggtaaattaactggtaacatatatattgaattcgctggttactatgaaaaagaccaaaaatcaaacccaatgattgctagacatgaaatattacctaaagattttgaatataataaatggttcagaatgacagctagtactgctattccttctactaactctgagggtaaaaaaatcaattatattagagcttgtttacgttatgacggtaaaaatcaaagcgtaaataatagtgctatattctattatgcgttacctcaattagagcgtggatcaaaaccaaccgagtggtcgttatcaagacttgacgtatttagcactgaacaattggcagctaagattgccttaaacccagagagtgtggatattatcgcaagaaatattgatttcaatactgactcaatgaagatttataattctaacggtacattaaacatttctggagatactttaacaattagtaacaacaatagttctaatgaagtaattataaatccaaaaggttttacacttaaaaaagatggtgtagttaagtttaaaaatggactagacacaagcgattatagtgtccaagcttatgaaccacagtttagttcatggaataatattaaagctactgatcccgctgctaagagtaagtataattacattcgacatattgagccggggatgaatggttattacactataaatactggtgtttacaattttgcagtacaacacaaacaactattagaggtaaataatacaaaaaatgcgagagttaacaggtatacatatctttacaacaaaaggtatttaaaaatacaaatgtctgcttcttctcgaggtaaaagtaagctttatataatattcaagacaaaaactggagatactacactccatcaagaaatagttagttctagttcaatggtatacccagatataacaattgacttacaggctaaattaggttatccgcctaacaatttgccagacttttttgaattacaagctggtattgcctatggagaaaataattctattgatggtttctttagaattagacgtatggcaatgacagatacaccaaatgcggaggtt

SEQ ID NO: 246 - DNA, 1248 bp, Staphylococcus epidermidis
atgtataacgtgacacagcatgcgacttataaaacaaaaaataaacgagaaactgctgtattaatcggtgtacatgctcaaacggatcgtcaatttaattttgaatctactatggaagagctcgatgctttatcacaaacttgccaacttaatgttaaaggacaaatcactcaaaatagagagcaatttgaccataaatattatgttggaaaaggaaaaatcgatgaaataaaatctttcatagaattccatgatatagatgttgtcgtaaccaacgatgaattaacgacggcacagtctaaaacgttaaatgataatttgggcattaaaatcatcgatagaacccaattaattttagagatattcgcgttgcgagcgagaagtagagagggaaagctacaagtagaacttgcacaactcgattatttgttaccaagactacatggtcatggtaaaagcctgtctcgtcttggtggtggcataggaacaagaggcccaggtgaaacaaaattagaaatggatcgtcgccatattagaacacgtatgaatgagattaaacatcaattaaaaacggtcgtggatcatcgggaaagatatagaaataaacgtgaacaaaatcaagtttttcaaatcgctttagttggttatacaaatgcaggaaaatcgtcatggtttaatgttttagctaatgaggagacctatgaaaaaaatattttgtttgcaacattagatcccaaaacacgacaaatacaagtgaatgaaggatttaatttaattatttctgatacggtaggatttattcagaaattaccaacgacattggtggctgcgtttaaatctacactagaagaagctaaaggtgcagacgtacttatgcatgtcgtcgatgcaagtcattcggaataccgtactcaaattgacactgtaaatcaaattattaatgatttagatatggaccatattccacaagtagttatttttaataaaaaagacttatgtaacgaacagatggatgtacctgtatctaaatctgcgcatgtttttgtatctagtcgtgatgaaaatgataaacaaaaggtgaaaaatttagtaattcaagaaataaaaaatagtctcagcccatacgaagaaattgtagatagtgctgatgcagatagattatattttcttaaacaacacacgcttgttactgaattaatatttgacgaaacacaagcatcttatcgtatcaaaggatttaaaaaatta

SEQ ID NO: 247 - DNA, 606 bp, Staphylococcus epidermidis
atgatgatcatcgtcatgttaatcttgagttatctgattggtgcattcccaagcgggttaattattggtaaattattttttaaaaaagatataagacaatacggtagtggaaatactggagcaactaacagttttcgtgttcttggaagaccagctggatttatagttacgtttttagatattttcaagggatttattacagtcttttttccactatggttcccagttcatgcggatggtgttataagcaccttctttacaaatggtttaatagtaggattgtttgcaatactcggtcacgtgtatccaatatatctgaaatttaatggcggaaaagcagtagctaccagtgcaggagttgtattaggtgtcaatcctattttacttcttatcttggcaattatcttttttagtgtattaaaaatctttaaatatgtttctttatcaagtatcattgcagcaattagttgtgtgattggttcaatcatcattcatgattatattttacttgctgttagcggaattgtttcaatcatattaataattcgacacaaatctaatatagttagaatttttaaaggagaagaacctaaaattaaatggatg

SEQ ID NO: 248 - DNA, 1671 bp, Staphylococcus epidermidis
atgatgaatcatagtgaagctttaactgaacaagtattttcatttgcttcagagctttatgcttatggtgtaagagaagtagtaattagtccaggttcacgttcaacaccattagcacttgttttcgaagcacatccaaatattaaaacatggattcaccctgatgagcgaagtgctgcattttttgctttaggtcttattaaaggtagcgaaaaacctgtagcaattctttgtacatctggaacagccgctgcgaactacacacccgctatagctgaaagtcaaattagtcgtttgcctctcgttgttttaacgagcgacagaccgcatgaactgcgcagtgtgggtgcacctcaagcaatcaatcaggtaaatatgtttagtaattatgtgaactttcaatttgatttgccgattgctgatggaagtgaacatacaattgatacaattaattatcaaatgcaaattgcaagtcaatatttatatggaccacaccgaggaccgattcattttaatttaccatttagagaaccactaacaccagatttagatcgtgtcgatttattaacatctgtaactaaaacgttacctcattatcagaaatcgatttcggtagatgatataaaagacatattacaagaaaaaaatggtctcatcattgtcggagatatgcaacaccaagctgttgatcaaatattaacgtattcaactatatatgatctgccaatcttagcagatccccttagtcagcttcgtaaagagaaacatcctaatgttataaccacttatgatttattgtatcgagcaggattaaatttagaagtagactatgtcatacgtgtaggtaagccagttatttctaaaaaattaaatcaatggttgaagaaaaccgatgcgtatcaaattattgtgcagaataatgatcaaattgatgtatttccgacaccacctcatatatcttatgagatttcagcaaatgattttttccgttcattaatggaagaaccacttgttgaacgaaaaaaatggttacagcaatggcaatcacttgaacaacaagcacgcattgaaataagtgattacttaaagcatgcgacagatgaagcggcatatgtagggagtttaattcaaaaacttacaaaagaagatacattatttgttggaaatagtatgccaattagagatgtcgataatttactgtttgatagtgaggcatctgtatacgctaatcggggtgccaatggaatagacggagtagtttcaactgcgctaggtatggcggcacataagaatgtgacattgcttattggtgatttatctttttatcatgacatgaacggtttattaatggccaaattaaatgaacttcatattaacattgtattagttaataacaacggaggaggtatcttttcatatttacctcaaaaacgatcggctacaaaatattttgagcgattatttggaacaccaacaggcttaaactttgaatatactgcactgttatatgattttacatttaagcgctttgataatttgactgactttaaatatgctgaattatctaaaatgggttctcacatgtatgaagttataaccaatagagacgaaaatttgcatcaacaccaaaatttatatcagaaattgagtgagattgttaatgttacatta

SEQ ID NO: 249 - DNA, 4005 bp, Staphylococcus epidermidis
atggcgaaaaaattcaattacaaattaccgtctatggttgctttaacgttatttggcacagcttttactgcacatcaagcaaatgctgctgaacaaccacagaatcagtctaatcataaaaatgtattagatgatcaaactgccctcaaacaagcagaaaaagctaaaagcgaagttacacaatcaactacaaatgtatctggtacacaaacatatcaagaccctacccaagttcaacctaaacaagacacacaaagtactacatatgatgcatcattagatgaaatgagtacttataatgaaatttcatcaaatcaaaagcaacaatctttatcaacagatgatgcgaatcaaaatcaaacgaattctgttacaaaaaatcaacaagaagaaacaaatgatttgacacaagaagataaaacatccactgatacaaatcaattacaggagacacaatctgtagcaaaagaaaatgagaaagatttaggagctaacgcaaataatgaacaacaagacaagaagatgactgcaagtcaaccttccgaaaatcaagcaattgaaactcaaactgcttctaatgataatgaaagccaacaaaaaagtcagcaagtaacttctgaacaaaatgaaactgctacacctaaagtatcaaatacaaacgcatctggttataattttgattacgatgatgaagacgatgatagctcaacagaccatttagagcctatctcattaaacaatgtgaatgctacatctaaacaaactacttcatataaatataaagaaccagctcaacgtgtaacaactaatactgtaaaaaaagaaacggcatctaatcaagcgactatagatacaaagcaattcaccccatttagtgcaactgctcaaccgagaacagtttattctgtatctagtcaaaaaacatcatcattaccgaaatatacaccaaaggttaattcttcaataaataactatattcgtaaaaagaatatgaaagcaccaagaattgaagaagattatacgtcatatttccctaaatatggctatagaaacggtgtgggacgtcctgaaggtatcgttgttcatgatactgcaaatgataactcaacaatcgatggcgagattgctttcatgaaacgtaattacacaaatgcattcgtacacgcatttgttgatggcaatagaattatagaaacagctccgacagattacttatcttggggtgcaggtccatatggaaatcaacgttttatcaatgttgaaatcgtccatacacatgattatgattcatttgcacgttcaatgaacaactacgctgattatgctgcaacgcaattgcaatattataatttaaaacctgatagcgctgaaaacgatggaagaggaacagtttggacacatgctgctatctctaacttcttaggaggtactgatcacgctgaccctcaccaatatttaagaagtcacaattatagctatgcagaattatatgacttaatttatgaaaaatatttaattaaaacgaagcaagtagcaccttggggcacaacatctacaaaaccgtcacaaccttctaaaccatcaggaggaactaataataagttaactgtgtctgctaatcgtggtgttgctcaaattaaaccaacaaataatggcttatatacaactgtttatgacagtaaaggtcataagactgatcaagtacaaaaaactctatccgttactaaaactgcaacattaggaaataacaaattctatttagttgaagactacaatagcggtaaaaaatacggttgggttaaacaaggtgatgttgtttataacactgctaaggcaccagtaaaagtgaatcaaacatataatgttaaagcagggtcaacactttacacagttccttggggtacaccaaaacaagttgctagcaaagtatctggtactggaaatcaaacatttaaagcaactaaacagcaacaaattgataaagcaacgtatctttatggtacagtgaatggtaaatctggttggattagtaaatattacttaactacagcatctaaacctagcaatccaactaaaccttcaacaaacaaccaattaacagtgactaacaatagtggtgttgctcaaatcaatgcaaaaaatagtggcttatatactacagtttatgacactaaaggaaagacaacaaatcaaatccaacgtacattgtcagtgacgaaagctgccacacttggtgataaaaaattctatcttgttggtgattataatactggtacaaattatggttgggtaaaacaagatgaggtcatttacaacacagctaaatcacctgtaaaaatcaatcaaacatacaacgtcaaacctggtgttaaattacacacagtaccttggggcacatataatcaagtggctggaacagtttcaggtaaaggcgatcaaacttttaaagcaactaaacaacaacaaattgataaagcaacatatctttatggtacagtgaacggtaaatctggttggattagtaaatactatttaactgcaccatcaaaagttcaagctttgtctactcaatcaacaccagcacctaaacaagtaaaaccatctacacaaactgtaaatcaaattgctcaagtgaaagctaataattctggaataagagcatctgtatatgataaaacagccaaaagtggtacgaaatacgctaaccgtacattccttatcaataaacaacgtactcaaggtaataacacgtatgtactacttcaagatggaacaagtaatactccattaggatgggtaaacattaatgatgtgacaactcaaaatatcggaaaacaaactcagtctataggtaaatattcagtaaaacctacaaataatggtctatattctattgcttggggtactaaaaaccaacaattactagcacctaatacgctagctaatcaagcatttaatgcttccaaagctgtttacgttggtaaagatttatatctatacggtacagtcaataacagaacaggatggattgctgctaaggatttaatccaaaacagtactgacgctcaatcaacaccatataactatacttttgttatcaataatagtaaaagttatttctatatggatccaacaaaagcaaaccgatattctttaaaaccatattatgaacaaactttcacagtcattaagcaaaaaaatattaatggcgttaaatggtactatggtcaacttttagacggtaaatatgtttggataaaatcaactgacttagttaaggaaaaaattaaatatgcatatactggaatgactttaaataacgcgataaatatccaatctcgtcttaaatataaaccacaagtacaaaatgagcctttgaaatggtcaaatgctaattatagtcaaattaaaaatgctatggatacaaagcgtttagctaatgattcatccttaaaatatcaattcttacgtttagatcaaccacaatacttgtcagcacaagctctcaataaattattaaaaggcaaaggtgtacttgaaaaccaaggcgctgcatttagccaagctgcacgtaagtatggtctaaatgaaatttatcttatctcacatgctttagtagaaacaggtaatggaacttcacaacttgctaaaggtggagatgtttcaaaaggtaaattcacaactaaaacaggtcacaaataccataatgtctttggaattggtgcatttgacaataatgcacttgtagatggtatcaaatacgctaaaaatgctggatggacttctgtctctaaagcaattattggtggcgctaaattcattggaaattcatacgtgaaagcaggacaaaatacgctatataaaatgcgttggaatcctgcaaaccctggtacgcatcaatatgcaactgatattaattgggcaaatgtcaacgcacaagtattaaaacaattttatgataaaattggtgaagtcggtaagtacttcgaaattccaacatacaaa

SEQ ID NO: 250 - DNA, 1299 bp, Staphylococcus epidermidis
gtggcatttgaatttagattacccgatatcggggaaggtatccacgaaggtgaaattgttaaatggtttattaaagccggcgatacaattgaagaagatgatgtattagcagaagttcaaaatgataaatctgtagtagaaattccttctccagtaagtggtactgttgaagaagtgttagtagatgaaggaacagtggcagtagtaggagatgtcatcgttaaaattgatgcacctgatgcagaagaaatgcaatttaaaggtcatggcgatgatgaggattctaagaaagaagaaaaagaacaagaatcaccagtgcaagaagaagcttcatcaactcaatcacaagaaaagacagaagtagatgaaagtaaaactgttaaagcgatgccgtcagtgcgtaagtatgcacgtgaaaatggtgtcaatattaaagctgtaaatggttctggtaaaaatggacgaatcacaaaagaagacatcgatgcatacttaaatggtggtagttccgaagaaggttcaaacactagcgcagcatctgaatcaacttctagtgatgtcgttaatgcttctgcaacacaagcattaccagaaggcgacttccctgaaactacagaaaaaatacctgcaatgcgcaaagcaattgctaaagcaatggttaattctaaacacactgcacctcatgttacattaatggatgaaattgatgtgcaagaattatgggatcaccgtaagaaatttaaagaaattgctgctgaacaaggtacaaaacttactttcttaccatatgttgttaaagcattagtttctgcacttaaaaaatatccagcacttaatacttctttcaatgaagaagctggagaggttgtacacaaacattactggaatattggtattgctgcagatacggataaaggattattagtaccagtagttaaacatgccgatcgtaaatcaatattcgaaatttctgatgaaattaatgaactagctgtaaaagcacgtgatggtaaattaacttcagaagaaatgaaaggtgcaacatgcacaattagtaatatcggttccgctggtggacaatggttcactccagttatcaatcacccagaagtagctatcttaggaattggccgtatcgctcaaaaacctatcgttaaagatggagaaattgtagctgcaccagtgttagctttatcattaagctttgaccatagacaaatcgatggtgctactggacaaaatgctatgaatcacattaaacgcttattaaataatccagaattattattaatggagggg

SEQ ID NO: 251 - DNA, 2208 bp, Staphylococcus epidermidis
atgaatgaaacagacgaaatttcacaaatctataacaagcatcgattaccaagtttaagtggtctagcaaaagtgtctccacttgttcatagggccagcataggaggcgttttaaatgtggcagaattaaacagaattaaacgcctagttcaagtgcaaaatcaatttaaaacattttacaatcaaatgctagaagaagatgaagaggttaagtatcctatactgcatgataaaatgaatcatctaccgatacttacagatttatttaaagaaattaatgaaacatgtgatgcacacgatttatttgaccatgcaagttatactttacaaagtattagaagtaaaatttcaagaacaaaccaacgaattcgtcaaaatttagatagaatagtgaaaaatcaagggaatcaaaaaaaactatctgatgcaattgtaacagtaagaaatgatcgcaatgttattccggtgaaagctgaatatagacaagatttcaatggtattgttcatgatcaatcggcatcaggacaaacactatatattgaaccgaattctgttgtagagatgaataatcaaatcagtcgtttgcgtaatgatgaagcagttgaacgtgaacgtatattgactgaattgacgggatttgtttcggcggaagctgacgcattactcattgctgaatcggttatgggtcaaattgattttttaattgctaaagctcgttatgcgcgcactataaaagggacaaaacctacatttaaagaggatcgaactatatatttacctaatgcatttcaccctttattagacaaagatactgttgtagcaaatacaattgaatttattgacgatgtagaaacagtcataattactggaccaaacacgggtggtaagacggttactttaaaaacactaggattgataattgtcatggcacaatcaggattgttaattcctacactggatggaagtcaattaagtatctttgaaaatgtatattgtgatattggagatgaacaatctatagaacaatcattatcaacattttcatctcacatgaaaaatatagtagaaatattacaagatgcagatcaaaatagtctcattttatttgatgaactaggcgcaggtacagatccaagtgaaggtgcggcactcgcaatgagtatcttagattatgtacgccgtttagggtctttagttatggcaacaacacattaccctgaattaaaagcttatagttataatcgtgaaggtgtcatgaatgcaagcgttgaatttgacgttgaaacactgagcccgacttataaattattaatgggtgttccagggagatctaatgcctttgatatatcgaaaaaacttggtctaagtctcaacatcattaataaagctaagacaatgatagggacagacgagcaagagatcaatgccatgattgaatcattagaacaaaattcaaaacgtgttgatcaacaacgtatagaattagatcgacttgtgagggaagcacagcaaacccacgatgctttgtctaaacaataccaacagtatcaaaattatgagacatcattgatggatgaagctaaagaaaaagctaatcagcgtgtgaaatctgcgactaaagaagcggacgaaattcttaaagaacttagaaatctaagagatcataagggcgctgaggtaaaagaacatgaattaattgataaaaagaaacaacttgatgatcaatatgaggtaaaatcaattaagcaacatgttcaaaagaaaaagtatgatacgattcatactggagatgaagtgaaagttctatcttacggtcaaaaaggtgaagtgcttgaacttgtaggtgacgaagaagcagttgtacaaatgggaatcattaaaatgaaattacctattgaagatttagaaaaaacgaaaaagaaaaaagaaaaacctacaaaaatggtaacaagacaaaatagacaaactattaaaacagaactagatttaagaggatatcgttacgaagaagctttaaatgaattagatcaatatcttgatcaggcggttttaagcaattacgaacaagtttatattattcatggtaaaggtacgggggcacttcaaaaaggtgttcaacaacatttgaaaaaacataaaagcgttagacaatttaggggaggtatgcctagtgaaggtggatttggtgtcactgtggcagaactcaag

SEQ ID NO: 252 - DNA, 1224 bp, Staphylococcus epidermidis
atgagtttttttaaacgtctgaaagataaattttctagtaaaaatgaagatgatattcaaaaagacctggatgaatctgtagattcaaatgttaacagtgattcagattcaatggatccgaatgattctgatgaacaagttaaacccaaaaagaaacctaaaaaattaagtgaagctgattttgacgaagatggcttgatatcgattgaagattttgaagaaatagaagctcaaaaaattggagcaaaattcaaggccggtttggaaaaatcacgtcaaaacttccaagaacagttaaataatttaattgctcgatatagaaaagttgacgaagatttcttcgaagctctggaagaaatgcttattactgcggacgttggttttaatactgttatgaaattaactgatgagctacgtacagaagcacaaagacgtaatatacaagaaacagaagacttaagagaggttatagttgagaagattgtagaaatctatcatcaagaggacgatcattctgaagcaatgaatattgaagatggacgtttaaatgtcatactgatggttggtgtgaatggtgtcggcaaaacaacaacaattggtaaattagcttatcgttatcaacaagaaggtaaaaaagtaatgttagctgctggtgatacttttagagctggagcaattcaacaattaaacgtctggggagaacgtgttggcgttgaagttgtgagtcaaaacgaaggttctgaccctgcagcagtagtatatgatgcgattaatgcagcaaaaaataaagacgtagatattttaatttgtgacactgcaggacgcttgcaaaataaatctaatttaatgcaagagttagataaaatgaaacgtgtgattaatcgagcaatacctgatgccccccatgaagctttattatgcttagatgcaacaactggtcaaaatgcactttcacaagcacgttcatttaaggaagttacaaatgtctcaggtatagttttaactaaattagacggtactgctaaagggggtattgtattagcaattcgaaatgagttacacattccagttaaatatgttggtttaggtgaaaaaatggatgacttacaaccgtttagtcctgaaagctatgtatatggattatttgctgatatgatagaacaaaatgaagatattcctgaagaaatctctagaaattcatccgttgaatctgaagaaggtaac

SEQ ID NO: 253 - DNA, 1653 bp, Staphylococcus epidermidis
atgaaaagaaattggtggaaagaagcagttgcatatcaagtatatccacgaagttttaatgatagtaatggagatggaataggtgatctacctggattaattgaaaaattagattatctagaaaatttaggaatagatgtcatttggttaagcccaatgtatccatcaccaaacgatgataatggatatgatattagtgactacaaaggcattatgagtgaatttggtacaatgaacgattttgatcaattgttatcaagcatacatcaaagagggatgaaattaatattagacttagtggttaatcacacatcagatgaacacccttggtttattgaatcaaaatctagtaaaacaaatgcaaaaagagattggtatatttgggcagatcctaaaccggatggatctgaacctaataactgggaaagtatctttaatggttcaacttgggagtttgacgaatcgactaagcaatactatttccatttatttagcaaaaagcagccagatttaaattgggaaaatccagatgtaagacaagctgtgtttgaaatgatgaattggtggtttgaaaaaggtattgacggatttagagttgatgccattactcatattaaaaagaattttgaagcaggagatttacctgtacctgatggcaaaaaatttgctccagcatttgatgtagatatgaatcagccaggaatacaagaatggctccaagaaatgaaagataaatcgttaagtcggtatgacattatgactgtaggcgaggctaatggtgttactcctaatgatgctgaagaatgggtaggagaagaaaatgggaaatttaatatgatattccagtttgaacatcttggtttatggagtactggcgatacgaaattcgatgttaaatcctataaacaagtcttaaatcgttggcaaaagcaactagaaaatgtaggttggaatgctttatttatcgaaaaccatgatcaaccacgtcgtgtttcaacctggggtgatgataaaaattattggtatgaatcagcaactagtcacgctactgcctactttttacaacagggcacaccttttatttaccaaggtcaagaaataggtatgactaattatccatttgaaagcattgaaagtttcaacgatgtcgcagtgaaaactgaatatcaaatagtcaaaaaagaaggtggagatgtcaatcaattactagataaatataaaatggaaaaccgagacaatgcaaggactccaatgcaatggaataattctatcaatgctggattcactactggtaagccatggtttcatgtaaaccctaactatacagaaattaatgttaaacaacaactaaatgataagttttcgatactttcttattataaagcgttaattcaactaaaaaaatctgatttgatttacacctacggtaagtttaatatggtcgatgctgaaaataagcaggtttttgcatatacacgcacatttaaaaacaatactgtattaattgtagccaatctcacaaatgaagtatcagaactaaacctaccttttgaattagatatttcatctgtagatataaaattgcataattatcacttaaatgatataaatttagaccatattaaaccttatgaatcattcgtcgttgaaata

SEQ ID NO: 254 - DNA, 1422 bp, Staphylococcus epidermidis
ttgagtcatagaaagctatttccttctatattccatttatatcaacaagacaatttagatgaacatattgctattattggtataggacgtcgcgattataataacgaacaatttcgcgaccaagttaaagcgtcaattcaaacttatgttaaagatacagatagaattgatgagtttatgacgcatgttttttatcataaaactgacgtgagtgataaagaaagttatcagtcattacttcaatttagtgagcgactagattcagaatttgctttaggtgggaatcgtctgttttacttagcgatggcaccacaattttttggagtgatctcagattaccttaaatcttctggtcttactcaaactacaggatttaaacgcttagttatagagaaaccatttggcagtgatcttaaatctgctgaatcattaaataatcaaataagacgttcgtttaaagaagaagaaatttatcggatagatcactatcttggcaaagatatggtgcaaaatatagaagttttgcgattcgcaaacgcgatgtttgaacctttatggaataataaatacatttcaaatattcaagttacatcatcagaagtattaggtgtcgaagatcgtggtggctactatgaatctagtggtgcacttaaagacatggtacaaaatcacatgctacagatggttgctttacttgcaatggaagcaccgataagtttgaatagtgaagatatacgtgcagaaaaagtcaaagtacttaaatctcttagacaattaaaaccagaagaagttaaaaagaatttcgtgcgtggtcaatatgatcaaggcaatatagatggtaaacaggttaagtcatatcgagaagaagatcgcgtagcaaaggattcggttacaccgacatttgtatcgggtaaattaacaattgataactttagatgggctggagttcctttctacattagaacgggtaaacgtatgaaatcaaaaacgatacaagtcgtagtagaatttaaagaagtacctatgaatttatattatgaaactgacaatttactagattctaatttgctagtcattaatattcaaccaaatgaaggaatttcattgcatttaaatgctaaaaagaacattcaaggaattgatactgagccagtgcaattatcatacgcaatgagtgctcaagataaaatgaatacagttgatgcatatgaaaacttattgtttgattgtcttaaaggtgatgcgactaattttacacattgggaagaattaaaatctacttggaaatttgtagatgcaatccaagatcaatggacaatggttgaaccatgtttccctaactatgaagcgggtacgaatggacctcttgaaagtgatcttttattaagtcgtgatggaaatcattggtgggatgatatccac

SEQ ID NO: 255 - DNA, 427 bp, Staphylococcus epidermidis
atgattaaaaaaaacaaagaagaactgaatgacatggagtatctagtcactcaagaaaatggtactgaacctccgtttcaaaacgagtattggaatcactttgaaaaaggaatttacgttgataaattgtccggcaaaccattatttacttcagaggataaatttgaatctaattgcggttggccaagtttctccaaagcattaaatgatgatgaaatcgtagaacttgttgataaatcatttggtatgattagaactgaagttcgatcagaaaaagcaaatagtcacttggggcatgtttttaatgacggacctaaagaaaaaggtggtttaagatactgtattaactctgctgcgattcagtttataccttatgataaactagaagagttaggatatggagatttaattaaacattttaaaaaat

SEQ ID NO: 256 - DNA, 801 bp, Staphylococcus epidermidis
ttgaaaaagttagcctttgcaattacagccgcttcaggcgcagcagcagttctatcacatcatgatgctgaagcttctacacaacataaggttcaatctggagaatccttatggactattgcacaacaatacaatacttcagtagaaagcattaagcagaataataatcttagcaacaatatggtattcccaggacaagttattaatgtaggtggaagtgcttcacaaaatactagttcaaacacttcttcaagttcagcatcttcacatactgtagtagcaggtgaatcattaaacatcatagctaataaatatggtgtttcagttgatgcattaatgcaagcaaatcatctaaatggttatttaattatgcctaaccaaatattaactatccctaatggtggttctggttcaggatcaggtggtacagcaactcaaactagcggtaattatacttcaccttcattcaaccatcaaaacttatacactgaaggtcaatgcacatggtatgtgttcgacaaacgttcacaagctggtaaacctatcagtacttactggtctgatgcaaaatactgggcgtcaaatgcagcgaatgatggttatcaagttgataatactccatctgttggtgcaattatgcaaagtacacctggaccatatggtcatgtagcatacgttgaacgtattaatggtgatggtagtattttaatttcagaaatgaattatgcaaatggtccatacaatatgaactatcgtactatcccagcttcagaagtatcttcatatgcatttatccactaa

SEQ ID NO: 257 - DNA, 648 bp, Staphylococcus epidermidis
atggcacgtattgctacaaaattgggctatcctgaaagcaatagtttcgtgactaatactgtaattgaatttgttttacataacgaagcatatcctcggttatataggattaaaactcgagatacgaacttaataaaaatttctcaagctaatgaaatctcacgtcaaattacaaatggcacgatgacgcttgaagaagctaagtatcaattagaggaaatatatgttgctaaaagagatagcagtctacccttcaaaggaattgccgcagcaattatcgctacgagcttcctctatctacagggaggtcgtctggttgatatcatcacagctgtattagctggaacgattggatacttagtagtagaaatattagatcgaaagctacacgcacaatttattccagaatttataggttctttggtaataggtattatttctgtaattggacatgcatttgttcctagcggagatttagctacaattatcattgccgcggtcatgcctattgtacctggagtacttattacaaatgctattcaagatttattcggaggacatatgttaatgtttacaacaaaatctttagaagctttagttactgcctttggtataggcgctggtgtaagttcaatattaattttagtc

SEQ ID NO: 258 - DNA, 876 bp, Staphylococcus epidermidis
atgacagaatttgacttatccactagagagggtcgttggaaacatttcggttctgttgaccctgtcaaaggtacgaaaccaactactaaaaatgaaatgaccgatttacaaagcactcacaaaaatttcttatttgaaatagaggaagtaggcattaaaaatttaacttatccagttttaattgatcagtatcaaacagctggtttatttagtttttcaacgagtttaaataaaaatgaaaaaggcattaatatgagtcgcatattagaaagcgttgaaaaacattatgataatggcattgaacttgaatttaacacactacatcaattgttgcgtacgctacaagataagatgaatcaaaatgctgcaggtgttgatgtgtcaggtaaatggttctttgatcgttatagtcctgttacacatattaaagctgtaggtcatgcagatgttacttatggtttagctattgaaaatcataccgttacacgtaaagaattaactattcaagccaaagtaacaacactatgtccttgctcaaaagaaattagtgaatattctgcacataatcaacgtggtatcgttacagttaaagcatatttagataaaaataatgacgtcatcgatgattataaaaataaaattttagacgctatggaagccaacgctagttctatcttatatccaatcttaaaacgtcctgatgaaaaacgagtaacagaacgtgcttatgaaaacccacgatttgttgaagatttaattcgactaattgcagcagacttagttgaatttgattggattgaagggttcgatattgaatgtcgtaatgaagagtctatccaccagcatgatgctttcgcacgtctgaaatatcgcaaa

SEQ ID NO: 259 - DNA, 973 bp, Staphylococcus epidermidis
gtgcaaaaaaaatatattactgccattattggaacaactgcccttagcgcattggcatcaactcatgcacaagctgcaacaacgcatacagtaaaaagtggagaatctgtatggtcaatttctcacaaatatgggattagtattgctaaattaaaatcacttaatggattgacttccaatttaatattccctaatcaagtattgaaagtatcaggctcatcttcaagagcaacgtcaacaaatagtggcacagtttatacagttaaagctggagattcattatcttctattgctgcaaaatacggtacaacttatcaaaaaatcatgcaacttaatgggttaaataactatcttattttccctggacaaaagttgaaagtttctggtaaagcgacgagttccagtcgtgcaaaagctagtgggtctagtggtcgtactgcaacatatactgttaagtatggagactcactatctgcaattgctagtaaatatgggacaacgtatcaaaaaattatgcaattaaatggattaactaatttctttatctatcctggacagaagttaaaagtgcctggaggtagttctagtagctcatcttctaataatactagatcaaacggtggctattattcaccaacttttaaccatcaaaacttgtatacttggggacaatgcacatggcacgtatttaatagacgtgctgaaataggaaaaggtatcagtacatactggtggaatgcaaataattgggacaatgcatcagctgctgatggatatactattgattatcgtcctacagtaggctcaattgcacaaactgacgctggttactatggtcacgtagcgtttgtagagcgcgtgaatagcgatggaagtattttagtttcagaaatgaactggagtgcagctcctggaaatatgacatatagaacaattccagcttatcaagtgagaaattacaaatttattcatt

SEQ ID NO: 260 - DNA, 1317 bp, Staphylococcus epidermidis
gtgaccaaaaaagcttttatttcttattctagaacaagtgatgaacatttaaatagagttgtgagaataggagaaagtttgagagttgatcatggaattgatgttattttagatgtatgggattgcactgagggagatgacttgaatttttttatggagtctatggttaatgacgagacgatagattttgttattatattaagcgattttcagtattttaatagagctaatgatagagaaggaggagttggaaaagaaagcacaataattacttctcaaatttatgataagcaaaaagatagtaagtttatacctgtctttttagatattctggataatggaaaaccatcattaccaactttttgtaatactagattcgctattgatatgacagacatcgaattagatatagagaaaatagaagagattgcaagaaaaatacacgataaacctttattcgaaaaaccaagacttggtaaagtaccagattataaccaaaatcaaaatgagttaaagaaagcaataaaaaaattaactttatctaaaagttataatgaaacgagaaattttgaagaagctttagacattatttataaaactttagaaaatatagaaaatagcgtagaggaatataataaagatgatttaatgactttaaaagaggtttttgatacttggaaagaatttattacgtatgcgctaaacaatgataacttttattttagggaattaatcatagagcattataataggtgcttaaagcttacggaagaagaatttgaaaatccaatgactaggatttttaattatttttcatttcttatactagtaagtgaatctttatcttcaggagcaaatgaatttttgaaagatttattgaatgctaaatttcattttagtagaagagaagcaaattattatatattaagtttatatccccaggtgttatccaagaaatattcatataatactaatgtcaaaaaaatgttagccgaaatgtactttgaagggaaggagttaaaaaaggttcaagatgcagatgtaattttatatacagaaagtcttatgaaaaaagatattcatagtgtatatgaaacgtggcatggggttctgttgtatagtagatggcctatgcttgagcaacaaactattaatattttaataaataaatttcgtagtaaaaaatatctagatcaatttgactttttatttggaagttcacaaagagaagtatttgaaaactatgataagattaaatccacacaagaaatacctactatttttaattttattgataaagaagaaattggcagctat

SEQ ID NO: 261 - DNA, 759 bp, Staphylococcus epidermidis
atgcactatctaaagaaagtaactatatacataagtttattaattttggtgagtggttgtggagacagcaaagaaacggaaatcaaacaaaactttaataaaatgttaaatgtgtatccaactaaaaatctagaagacttttatgataaagagggttatcgtgatgaagagtttgataaggatgacaaaggaacatggattattagatctgaaatgacaaaacagccaaaaggtaagattatgacttcaaaaggtatggtgttacatatgaatagaaatactagaagtacaactggttattacgttattaggaaaatttctgaagataataaaagtgaaattgatgatgaagaaaagaaatatcctataaagatggtaaataacaagataattccaactcaaaaaattaatgacaataaattgaagaatgaaatagaaaactttaagttctttgtacaatacggaagctttaaaaattcagatgattataaagaaggggatattgaatacaatcctaatgcaccaaattattctgcacaatatcatttaagtaatgatgactataatattaaacaattaagaaaaagatatgatattaaaacgaaaaaaactcctagattattaatgagaggcgctggagatccaaaaggatcttctgtaggttataaaaatcttgaatttacatttgttaagaataatgaggaaaatatttattttaccgatagtattaattttaatccaagcaagggtaaatcattg

SEQ ID NO: 262 - DNA, 783 bp, Staphylococcus epidermidis
gtgaaacattcgaaaaagttacttttatgcatcagttttttattaataacgttttttattggtggatgtggatttatgaataaagacgatggtaaagaaacggaaatcaaacaaaactttaataaaatgttaaacgtgtatcccactaaaaatctagaaaacttttatgataaagagggctatcgagatgaagagtttgataaggatgacaaaggaacatggatagttcattctaaaatggttattgaaccaaaaggcaaaaacatggaatctagagggatggttctctttatcaatcgcaatactagaacatcaaaaggctattttatagtcaatgaaatagaaaaggatagaaaaggaagacccattaataataaaaagaaatatcctgtaaaaatgaaaaataataaaattattccaaccaaaccaatatctaatgataaattaaaaaaagaaattgaaaactttaaattttttgtacaatatggcaattttaaagatattaaaaattataaagatggtgacatttcatacaatcctaatgtacctagttattctgcaaaatatcaattgagtaataatgaatataacgtacaacaattaagaaaaagatatgacatcccaactaaaaaagtacctaaactattgttgaaaggtgatggggatttaaaaggttcatccgtaggttctaaaaatctagaatttacttttatagaaaataaagaagagaatatctattttacagattctgtactatttagccctagcgaggataatgaatca

SEQ ID NO: 263 - DNA, 759 bp, Staphylococcus epidermidis
atgcgttatctcaagaaagtaacgatatacataagtttattaattttggtaagtggttgtggaaacggtaaagaaacggaaatcaaacaaaactttaataaaatgttagacatgtatccgactaaaaatctagaagacttttatgataaagaaggctatcgagatgaagagtttgataaaaaggataaagggacatggatagttggatctaccatgacaattgaaccaaaaggcaagtacatggaatctagaggtatgtttctatatattaatcgcaatactagaacaactaaaggttattattatgtgaggaaaacaacagatgacagtaaaggtagactaaaagatgatgaaaagagatatcctgtaaaaatggaacacaataaaattattccaacgaagccaatacctaatgacaaactaaaaaaagaaatagaaaacttcaaattttttgtacaatatggagattttaaaaacttaaaggattataaagatggtgacatttcatacaatcctaatgtacctagttattctgcaaaatatcaattgagtaataatgactataatgtaaaacaattacgaaaaagatatgatattcccaccaaccaagcccctaaattattgttaaaaggagatggtgacttaaaaggctcatctataggttccaaaagtttagaatttacttttatagaaaataaagaagagaatatctttttttcagatggtgtacaatttactcctagcgaggatagtgagtca

SEQ ID NO: 264 - DNA, 777 bp, Staphylococcus epidermidis
atgaaacattcaagcaaaataatagtatttgtaagtttcttaattttaacgatttttattggaggatgtggttttataaataaagaagatagcaaagaagctgaaatcaaacaaaactttaataaaacgttaagtatgtatccaactaaaaatctagaagacttttatgataaagagggctatcgtgatgaagagtttgacaaagatgacaaagggacatggattattaattctaaaatgattgttgaaccgaaaggggaagagatggaagcaagagggatggttttacgtataaatagaaatacgagaacagctaaaggtaactttattataaaacgaataacagaaaataataaaggaatacctgatgttaaagacaaaaaatatccagtaaaaatggaacacaataaaattattccaacaaaacaaattaaagataaaaaattaaaaaaagaaattgagaacttcaaattttttgtacaatatggaaattttaaaaacttaaaggattataaagacggagagatatcttacaatcctaatgtgccaagttactcagcgcaatatcaattgaacaattatgataataatgttaaacaactaagaaaaagatatgatattcccacgaatcaagctcctaaattattattgaaaggtacaggagatttaaaaggatcctctgtaggttataaacatcttgaatttacttttgtagaaaataaaaaggaaaatatttattttactgacagtataaactttaacccgagtagggggaat

SEQ ID NO: 265 - DNA, 783 bp, Staphylococcus epidermidis
atgcgttatctcaagaaagtaactatatacataagtttattaattttaacgatttttattggaggatgtggttttataaataaagaagatagcaaagaaacggaaatcaaacaaaactttaataagatgttaaacgtgtatcctactaaaaatctagaagacttttatgataaagaaggttttcgagatgaagaatttgataaaggagataaaggaacttggattattaggtctgaaatgacaaaacagccaaaaggtaaaattatgacctcaagaggtatggttctctatatcaatcgtaacactagaacagccaaagggtattttttaatagatgagataaaagatgataatagtggtagaccgatagagaatgaaaagaaataccctgtaaaaatgaaccataataagatctttccaacaaagccaatatctgatgataaattaaaaaaagaaattgaaaacttcaaattttttgtacaatatggagattttaaaaacttaaaggattataaagacggagagatatcttacaatcctaacgttcctagttactcagcgcaatatcaattgaacaataatgataataatgttaaacaattaagaaaaagatatgatattccaaccaatcaagcccctaaattattgttaaaaggggatggcgacttaaaaggatcatctgtaggttctaaaaatttagaatttacttttgtagaaaataaagaagagaatatattttttacagatgcagtacaattcactcctagcgaggatgatgaatca

SEQ ID NO: 266 - DNA, 1536 bp, Staphylococcus epidermidis
atgaagacctataagccgtaccgacatcaattaaggcgttcgctatttgcctcaacgattttcccagtatttatggtgatgattattggtttaataagcttttatgctatttatatatgggtcgaacatcgcaccattcatcagcatacctatcaaactcaaaccgaattacaacgtatcgacaaacattttcatacgtttgttacgcagcaacaaaaacaatggcgtcatgttgatttatcacatccaactgatatcacaaagatgaaacgccaactattaaaacaagtccatcaacaacctgcgatattgtattacgatttaaaaggttcttcacaatctttcacaaacaattatgaacaattagacacaacaaagatgtatttaatatcaaaatatcgaattgattttaaagacgatacttatatccttaaaatatatatgtcaagcacaccactacttaaaaacattaagaaaaatagtggacaatctgcactcattgttgattcatatgatactgttttatatacaaatgacgaccgattctctatcggtcaaaaatatcaaccaccacagtttgggtttatgaacgagtctttaaaactcaattctcatcatgcgcatcttattatatataaagatattcatgaaaccattgaagatggaattgcattactagttgtcatgggtgttgttcttattctgcttgttatttttggatatataagcgctgatagaatggcaaagcgccaatctgaagatattgaagcgattgtccgaaaaattgatgatgctaaaaatcgacatcttggtagttacgaaccgttaaaaaaacatagtgagttagaggaaataaataattatatctatgacttgtttgaatcaaatgagcaattaatacaatctattgaacagaccgaacgtcgtttacgtgatatacaattaaaagaaattgagcgacaatttcaaccccatttcttattcaatacgatgcaaacgatacaatatttaattcctctttcacccaaagtagcacaaacagtcatacaacaactatcacaaatgctacgttattctctacgcacagcatcgcacacagtcaaattagcagaagaattaagctacattcagcagtatgttgctatacaaaatatccgcttcgatgatatgatacagctttacatcgatgctcctgaagatgtacaacatcaaacaattggtaagatgatgcttcaaccactcgtagaaaatgccatcaagcatggtcgtggtagtgaacctttaaagataacaattcgtatcagacttacgaagcgcaaattacatattctggttcatgataatggcatcggtatgtctccatcacatttagaacgcgtgcgccaatcacttcatcacgatgtttttgatacgacacacctaggtttaaatcatttacataatagagccatcattcaatatggaacatatgcacgtctgcacattttctcaagaagccatcaagggacattaatgtgttaccaaataccacttgtc

SEQ ID NO: 267 - DNA, 3091 bp, Staphylococcus epidermidis
gtggatgatgtgacaaaatatggtccagttgatggagatccgattacgtcaacggaagaaattccgtttgataaaaaacgcgaatttgatccaaacttagcgccaggtacagagaaagtcgttcaaaaaggtgaaccaggaacaaaaacaattacaacaccaacaactaagaacccattaacaggagaaaaagttggcgaaggtgaaccaacagaaaaaataacaaaacaaccagtggatgagatcgttcattatggtggcgaagaaatcaagacaggccataaggatgaatttgatccgaacgcaccgaaaggtagtcaaacaacgcaaccaggtaagccaggagttaaaaatcctgatacaggcgaagtagtcacaccaccagtggatgatgtgacaaaatatggtccagttgatggagatccgattacgtcaacggaagaaattccgtttgataaaaaacgcgaatttgatccaaacttagcgccaggtacagagaaagtcgttcaaaaaggtgaaccaggaacaaaaacaattacaacgccaacaactaagaacccattaacaggggaaaaagttggtgaaggtgaaccaacagaaaaaataacaaaacaaccagtggatgagatcgttcattatggtggcgaagaaatcaagccaggccataaggatgaatttgatccaaacgcaccgaaaggtagccaagaggacgttccaggtaaaccaggagttaaaaatcctgatacaggcgaagtagtcacaccaccagtggatgatgtgacaaaatatggtccagttgatggagatycgattacgtcaacggaagaaattccgtttgataaaaaacgcgaatttgatccaaacttagcgccaggtacagagaaagtcgttcaaaaaggtgaaccaggaacaaaaacaattacaacaccaacaactaagaacccattaacaggggaaaaagttggcgaaggtgaaccaacagaaaaaataacaaaacaaccagtagatgaaatcacagaatatggtggcgaagaaatcaagccaggccataaggatgaatttgatccgaacgcaccgaaaggtagccaagaggacgttccaggtaaaccaggagttaaaaatcctgatacaggcgaagtagtcacaccaccagtggatgatgtgacaaaatatggtccagttgatggagatccgattacgtcaacggaagaaattccgtttgataaaaaacgcgaatttgatccaaacttagcgccaggtacagagaaagtcgttcaaaaaggtgaaccaggaacaaaaacaattacaacaccaacaactaagaacccattaacaggagaaaaagttggcgaaggtgaaccaacagaaaaaataacaaaacaaccagtggatgagatcgttcattatggtggcgaagaaatcaagacaggccataaggatgaatttgatccgaacgcaccgaaaggtagtcaaacaacgcaaccaggtaagccaggagttaaaaatcctgatacaggcgaagtagtcacaccaccagtggatgatgtgacaaaatatggtccagttgatggagatccgattacgtcaacggaagaaattccgtttgataaaaaacgcgaatttgatccaaacttagcgccaggtacagagaaagtcgttcaaaaaggtgaaccaggaacaaaaacaattacaacgccaacaactaagaacccattaacaggggaaaaagttggtgaaggtgaaccaacagaaaaaataacaaaacaaccagtggatgagatcgttcattatggtggcgaagaaatcaagccaggccataaggatgaatttgatccaaacgcaccgaaaggtagccaagaggacgttccaggtaaaccaggagttaaaaatcctgatacaggcgaagtagtcacaccaccagtggatgatgtgacaaaatatggtccagttgatggagattcgattacgtcaacggaagaaattccgtttgataaaaaacgcgaatttgatccaaacttagcgccaggtacagagaaagtcgttcaaaaaggtgaaccaggaacaaaaacaattacaacgccaacaactaagaacccattaacaggagaaaaagttggcgaaggtgaaccaacagaaaaaataacaaaacaaccagtggatgagattgttcattatggtggtgaacaaataccacaaggtcataaagatgaatttgatccaaatgcacctgtagatagtaaaactgaagttccaggtaaaccaggagttaaaaatcctgatacaggtgaagttgttaccccaccagtggatgatgtgacaaaatatggtccagttgatggagattcgattacgtcaacggaagaaattccgtttgataaaaaacgcgaatttgatccaaacttagcgccaggtacagagaaagtcgttcaaaaaggtgaaccaggaacaaaaacaattacaacgccaacaactaagaacccattaacaggagaaaaagttggcgaaggtaaatcaacagaaaaagtcactaaacaacctgttgacgaaattgttgagtatggtccaacaaaagcagaaccaggtaaaccagcggaaccaggtaaaccagcggaaccaggtaaaccagcggaaccaggtacgccagcagaaccaggtaaaccagcggaaccaggtacgccagcagaaccaggtaaaccagcggaaccaggtaaaccagcggaaccaggtaaaccagcggaaccaggtaaaccagcggaaccaggtacgccagcagaaccaggtacgccagcagaaccaggtaaaccagcggaaccaggtacgccagcagaaccaggtaaaccagcggaaccaggtacgccagcagaaccaggtaaaccagcggaatcaggtaaaccagtggaaccaggtacgccagcacaatcaggtgcaccagaacaaccaaatagatcaatgcattcaacagataataaaaatcaattacctgatacaggtgaaaatcgtcaagctaatgagggaactttagtcggatctctattagcaattgtcggatcattgttcatatttggtcgtcgtaaaaaaggtaatgaaaaat

SEQ ID NO: 268 - protein, 1870 aa, Staphylococcus epidermidis
MTKKEKDYKKSLEQQKTRVKIYKSGKSWVKASINEIELLKTMGLPFLSKNEIQENVTEKTKGHKLKKSAAKTTALVGGAFTFNMLNNHQAFAASETPITSEISSNSETVANQNSTTIKNSQKETVNSTSLESNHSNSTNKQMSSEVTNTAQSSEKAGISQQSSETSNQSSKLNTYASTDHVESTTINNDNTAQQDQNKSSNVTSKSTQSNTSSSEKNISSNLTQSIETKATDSLATSEARTSTNQISNLTSTSTSNQSSPTSFANLRTFSRFTVLNTMAAPTTTSTTTTSSLTSNSVVVNKDNFNEHMNLSGSATYDPKTGIATLTPDAYSQKGAISLNTRLDSNRSFRFIGKVNLGNRYEGYSPDGVAGGDGIGFAFSPGPLGQIGKEGAAVGIGGLNNAFGFKLDTYHNTSTPRSDAKAKADPRNVGGGGAFGAFVSTDRNGMATTEESTAAKLNVQPTDNSFQDFVIDYNGDTKVMTVTYAGQTFTRNLTDWIKNSGGTTFSLSMTASTGGAKNLQQVQFGTFEYTESAVAKVRYVDANTGKDIIPPKTIAGEVDGTVNIDKQLNNFKNLGYSYVGTDALKAPNYTETSGTPTLKLTNSSQTVIYKFKDVQGPQISVDSQTREVGKTINPITITTTDNSKDVLTTTVTGLPSGLSFDQTTNTIIGTPSEVGTTTVTVNTTDATGNVTSKQFTITIQDTISPVVNVTPSQASEVFTPINPITITATDNSGKVVTHTVTGLPQGLKFDASTNSIVGTPTQIGTNTITIESTDASGNKTTTKINYEVTRNSASDSTSTSIVNSVSTSISNSTSLSDSVKASQSLSTKESTSKSLSGSLSASTSNSASIKASESASTSKKLSESASTSMSDSASIKASESASTSKKLSESASTSTSDSASIKASESASTSKKLSESASTSMSDSVSIKASESASTSKKLSESASTSTSDSASTQASESASTSKKLSESTSTSTSDSASTSTSESDSTSESTSLSDSTSASLSESTSTSTSDSASTSTSESDSNSTSTSLSESTSTSLSESTSTSTSDSASTSASVSDSNSASTSLRESTSTSLSDSTSTSTSDSASTSTSESDSDSASTSLSGSSSTSVSDSTSASTSESASTSTSISDSNSTSTSLSESTSTSLSESTSTSTSDSASTSMSVSDSNSASISLSESTSTSVSDSTSTSTSESASTSTSESDSNSASTSLSESTSTSVSDSTSTSTSDSASTSTSVSDSNSASTSLSESTSTSISDSTSTSTSDSASTSTSVSESSSTSKKLSESASTSMSDSASASTSESNSTSTSLSGSTSTSLSGSTSTSTSESASTSTSVSDSNSASTSLSESTSTSLSDSTSTSTSDSTSASTSESDSNSTSTSMSESLSTSVSDSTSTSTSDSASTSTSVSDSNSASTSLSDSTSTSISDSTSASTSDSASESASESESTSESTSVSESSSTSVSDSTSTSTSESASTSTSESESTSESTSVSESSSTSVSDSTSTSTSESASTSTSESESTSESTSLSGSSSTSVSDSTSTSTSESASTSTSVSDSNSTSTSLSESTSTSLSNSTSTSTSDSASTSTSVSDSNSASTSLSGSLSTNVSDSTSTSTSDSASTSTSESDSNSASTSLSGSLSTSISDSTSTSTSDSASTSTSESASTSTSVSESDSESTSMSVSDSNSTSTSLSDSTSTSVSDSTRTSTSDSASTSKSVSESNSASTSVSGSTSTSISDSSSTSTSMSTSETFTSQSPINSESQFIGDSLSEDTIVTQSKNTNMLNKTGKDYDLQEQRGYTDSEQHNETQSNQADNHSNNLDLLHQNRLQDKVVKQPTKGEDGVVSNGFIVAVAIVLAIFGLAKKSRKDDDDQDGSK

SEQ ID NO: 269 - protein, 235 aa, Staphylococcus epidermidis
MKKTVIASTLAVSLGIAGYGLSGHEAHASETTNVDKAHLVDLAQHNPEELNAKPVQAGAYDIHFVDNGYQYNFTSNGSEWSWSYAVAGSDADYTESSSNQEVSANTQSSNTNVQAVSAPTSSESRSYSTSTTSYSAPSHNYSSHSSSVRLSNGNTAGSVGSYAAAQMAARTGVSASTWEHIIARESNGQLHARNASGAAGLFQTMPGWGSTGSVNDQINAAYKAYKAQGLSAWGM

SEQ ID NO: 270 - protein, 307 aa, Staphylococcus epidermidis
MNKNKVIVIGSTNVDKFLNVKRFPKPGETLHINQAQKEFGGGKGANQAIAASRLAADTTFISKVGKDGNANFILEDFKKAGIHTQYILTSESEETGQAFITVDEAGQNTILVYGGANMTLSATDVEMSVDAFIGADFVVAQLEVPFEAIEQAFKIARKQNITTVLNPAPAIELPKSLLELTDIIIPNETEAELLTGISINNESDMKETATYFLDLGISAVLITLGEQGTYCAYQEQYKMIPACNVKAIDTTAAGDTFIGAFLSELNKDLSNLESAIRLANQASSLTVQRKGAQASIPTRKEVEAEYN

SEQ ID NO: 271 - protein, 277 aa, Staphylococcus epidermidis
MALKKYKPITNGRRNMTTLDFAEITKTTPEKSLLQPLPKRAGRNNQGKLTVRHHGGGHKRQYRVIDFKRNKDGIIAKVDSIQYDPNRSANIALLVYADGEKRYIIAPKGLQVGQTVESGAEADIKVGNALPLQNIPVGTVIHNIELKPGKGGQLARSAGASSQVLGKEGKYVLIRLRSGEVRMILSTCRATIGQVGNLQHELVNVGKAGRSRWKGVRPTVRGSVMNPNDHPHGGGEGRAPIGRPSPMSPWGKPTLGKKTRRGKKSSDKLIVRGRKKK

SEQ ID NO: 272 - protein, 288 aa, Staphylococcus epidermidis
MKSKFTILLFTIFSTTVLVLVIIYNKTQSQSYISTHYSNNKIKTTATLFLHGYGGSERSETFMVKQALNKNVTNEVITARVSSEGKVYFDKKLSEDAANPIVKVEFKDNKNGNFKENAYWIKEVLSQLKSQFGIQQFNFVGHSMGNMSFAFYMKNYGDDRHLPQLKKEVNIAGVYNGILNMNENVNEIIVDKQGKPSRMNAAYRQLLSLHKIYCGKEIEVLNIYGDLEDGSHSDGRVSNSSSQSLQYLLRGSTKSYQEMKFKGAKAQHSQLHENKDVANEIIQFLWET

SEQ ID NO: 273 - protein, 265 aa, Staphylococcus epidermidis
MKIGIDAGGTLIKIVQEHDNRRYYRTELTTNIQKVIDWLNNEEIETLKLTGGNAGVIADQIHHSPEIFVEFDASSKGLEILLDEQGHQIEHYIFANVGTGTSFHYFDGKDQQRVGGVGTGGGMIQGLGYLLSNITDYKELTNLAQNGDRDAIDLKVKHIYKDTEPPIPGDLTAANFGNVLHHLDNQFTSANKLASAIGVVGEVITTMAITLAREYKTKHVVYIGSSFNNNQLLREVVENYTVLRGFKPYYIENGAFSGALGALYL

SEQ ID NO: 274 - protein, 2681 aa, Staphylococcus epidermidis
MTLNNHFAYTFEERPTPKLWLCKPDGTRIERIADFSKLGGTFKFTNVNTLHFDLPLQVFSEDTKQIERNKVVDLVKNKYLIDYRYNGYRDIFVIDDIKKSANDSDFITLNLDSRASELNKKAANEIELLGSTIPQMMNKILSVYAPLWKLGHVDGKIIDVKRELTGSNTTVNALIDNICSLFDAVAIYNNINRTISFYHKDNVGTNRGLRVRENSYLKSFEDQFVSKDIVTRLYPFGQSGLTIQSVNPAGSSYIEDFSYFMSPFKRDNNRNVLQHSDYMSDELCHALLDYQEFYASKKDQAGELSKQYSAILKEHSQEDFRLNQLSATLQRLNERVELVKPKSEYIDLGTKVKNFKITVPKSSYYLIMIRNDGSFTRIKFNNKQYDIPSGEWLYIKLKTGKFNDATKFEKQLEYPLEILSANANLRVVYTRSSEGDYEEEDTKTIEEKYNLEKYKILVKDQEKVVASIERRLKAFEDQKASVIRSMNAKNFLSEKLYNERELYVFESVWTEENHTDAQELYDDAVKQMKEQKKINRTITVDLVNFIQSLDHKDDWDKLNVGDKVVFQNKIFNTKIKAYITEMQLDFQTNQVKITISDIFDYKDLDTIIAEKLAQTTSTSSQVDFHKQQIREQTGRITDMTRLIEGEWDANKKRVMAGNETVDIGSHGVKVISKENPNEFVIMVGGVIAMTRDNGETFKTGITPEGINAEMLIGKMIVGETLTFENESGTVKFDKDGLYVNSKNFHLVSNDGEEDYFDKLKREMSENAKQQTDRMLEEYKKEVSQTISEATDVRNIVDNAADILQAAFADGVITDVEKRLISETLAQLEKENREFEDKINLALNHPYITEEDTIELNNSIVEYSSMYETLVISINESVSDKMITPQESEEINQNIINFREEIKDILSLVEEIIERTKNAQLQATLEEAKDYTTRVRDDIKDELKDLNNSFKSLNSTVEESLQDNIFDAAELEAIKTVVLVTKSEYQDITNRYSSMSANTDLKSESKLDLTKSYKTLDTSFNDFVKYIDEMTMDRIADETEKVNYKKKYDTLQKNLSDYMKKYDNCILEISKKYSNDAADKVLGDFTAIATELQNDFQDVKDNWAEFKQTTLESFKDGIVTEAEKARLRVQLDMLDRESMDIEERYKSLLANQYTNTDIKNRLTASRSPYLSVHASLRKVIEQIIADGKVDESEKTLANNSLNTYNTTLTAYSKTIQEALNTLSQIISSDVASKKVEEFNGVITTISSDVDTIKKQRDGAVITYYYSGVPTLSNDPAKSWTTNDLKDLHIKDMYLDTKSGYAYTFTKSGTSYSWKPLTDQVIVSSLKQAKNAQDTADNKRRVFVTQPIPPYDQGDMWTQGSQGDIYVCGTSRATGSFVSSDWVKASKYTDDTVAKQAAKDLEDYKVKMTKDFKDLNDGVSTFKTEVVKDFKDGIVTEAEKTRLRVQLDILDRESQDIEERYNSIFNSQYADTQVKTSISNARSTYNNSLTKLRNTIQTVIEDGKVTPTEKTTANQTLTAYNNALTSYSAAIQEALNSMSKVIAQKEATSQVNQFNEVIKNINTNITDIQKQVDGAIETFYYSGVPTLTNIPASYWTTASKREAHLGDLYLDTATGVAYRFLKKGTTSPTYYWSPISDQIITDALNRAKTAQDTADGKRRVFVNTPVPPYDTGDMWTQGASGDILVCKTPKAKGGIYSISDWVKASKYTDDTVANSAVQQLNEYKRTNNLDIADLKRKTSDFEKTVVNAFDDRVISISESSSIKGQLALLNHEKDRLTRQYENIIRNSNLVGAEKTKLSTAYSNINTKLSDLSTTINSAIVDNKIVDAESKSVTSKFELYKASVNEYQIAFDNALNSIIREIASSQAKDRLDEWKRTEFSTDSDGIIERVAGAKFDSKWTDTWRNTVNPAIQQVSNITYGSENLLLNSESRSDGANTTTHSFIRYYLTRPLETGKTYTLKASVLTTDERQSGQISVYPYSPNGARETVNIKDGKITYTFTAQTESTQFLIYKDVAGQSDVDLNVTIEKAILVEGNKVTGWSPAPEETSSALRDYNTRISSAETFIEKNKEKISQIATKSDVDASLSKVATYETQYNVSSGTNYQIPLQEYNGSFFTDNYTYEVVAKNNSLSSNNVATAIFVSKGSNNGYELVELDNMSKTGANPRFVLDSKGRPSISTFSPQSTTQDISVIYTKYLGSASAINTTKSLIEQTASSIELQVKKLTAETEYNNILLNSDFSSGWEGWINVDPQYSIVDKNTFGITLPDAITNKNKKYNTVKMTYNKNTNYPSVFSNFISVGKGQEVAIGEHLTLTCYAYIPSSSKGKLTGNIYIEFAGYYEKDQKSNPMIARHEILPKDFEYNKWFRMTASTAIPSTNSEGKKINYIRACLRYDGKNQSVNNSAIFYYALPQLERGSKPTEWSLSRLDVFSTEQLAAKIALNPESVDIIARNIDFNTDSMKIYNSNGTLNISGDTLTISNNNSSNEVIINPKGFTLKKDGVVKFKNGLDTSDYSVQAYEPQFSSWNNIKATDPAAKSKYNYIRHIEPGMNGYYTINTGVYNFAVQHKQLLEVNNTKNARVNRYTYLYNKRYLKIQMSASSRGKSKLYIIFKTKTGDTTLHQEIVSSSSMVYPDITIDLQAKLGYPPNNLPDFFELQAGIAYGENNSIDGFFRIRRMAMTDTPNAEV

SEQ ID NO: 275 - protein, 416 aa, Staphylococcus epidermidis
MYNVTQHATYKTKNKRETAVLIGVHAQTDRQFNFESTMEELDALSQTCQLNVKGQITQNREQFDHKYYVGKGKIDEIKSFIEFHDIDVVVTNDELTTAQSKTLNDNLGIKIIDRTQLILEIFALRARSREGKLQVELAQLDYLLPRLHGHGKSLSRLGGGIGTRGPGETKLEMDRRHIRTRMNEIKHQLKTVVDHRERYRNKREQNQVFQIALVGYTNAGKSSWFNVLANEETYEKNILFATLDPKTRQIQVNEGFNLIISDTVGFIQKLPTTLVAAFKSTLEEAKGADVLMHVVDASHSEYRTQIDTVNQIINDLDMDHIPQVVIFNKKDLCNEQMDVPVSKSAHVFVSSRDENDKQKVKNLVIQEIKNSLSPYEEIVDSADADRLYFLKQHTLVTELIFDETQASYRIKGFKKL

SEQ ID NO: 276 - protein, 202 aa, Staphylococcus epidermidis
MMIIVMLILSYLIGAFPSGLIIGKLFFKKDIRQYGSGNTGATNSFRVLGRPAGFIVTFLDIFKGFITVFFPLWFPVHADGVISTFFTNGLIVGLFAILGHVYPIYLKFNGGKAVATSAGVVLGVNPILLLILAIIFFSVLKIFKYVSLSSIIAAISCVIGSIIIHDYILLAVSGIVSIILIIRHKSNIVRIFKGEEPKIKWM

SEQ ID NO: 277 - protein, 557 aa, Staphylococcus epidermidis
MMNHSEALTEQVFSFASELYAYGVREVVISPGSRSTPLALVFEAHPNIKTWIHPDERSAAFFALGLIKGSEKPVAILCTSGTAAANYTPAIAESQISRLPLVVLTSDRPHELRSVGAPQAINQVNMFSNYVNFQFDLPIADGSEHTIDTINYQMQIASQYLYGPHRGPIHFNLPFREPLTPDLDRVDLLTSVTKTLPHYQKSISVDDIKDILQEKNGLIIVGDMQHQAVDQILTYSTIYDLPILADPLSQLRKEKHPNVITTYDLLYRAGLNLEVDYVIRVGKPVISKKLNQWLKKTDAYQIIVQNNDQIDVFPTPPHISYEISANDFFRSLMEEPLVERKKWLQQWQSLEQQARIEISDYLKHATDEAAYVGSLIQKLTKEDTLFVGNSMPIRDVDNLLFDSEASVYANRGANGIDGVVSTALGMAAHKNVTLLIGDLSFYHDMNGLLMAKLNELHINIVLVNNNGGGIFSYLPQKRSATKYFERLFGTPTGLNFEYTALLYDFTFKRFDNLTDFKYAELSKMGSHMYEVITNRDENLHQHQNLYQKLSEIVNVTL

SEQ ID NO: 278 - protein, 1335 aa, Staphylococcus epidermidis
MAKKFNYKLPSMVALTLFGTAFTAHQANAAEQPQNQSNHKNVLDDQTALKQAEKAKSEVTQSTTNVSGTQTYQDPTQVQPKQDTQSTTYDASLDEMSTYNEISSNQKQQSLSTDDANQNQTNSVTKNQQEETNDLTQEDKTSTDTNQLQETQSVAKENEKDLGANANNEQQDKKMTASQPSENQAIETQTASNDNESQQKSQQVTSEQNETATPKVSNTNASGYNFDYDDEDDDSSTDHLEPISLNNVNATSKQTTSYKYKEPAQRVTTNTVKKETASNQATIDTKQFTPFSATAQPRTVYSVSSQKTSSLPKYTPKVNSSINNYIRKKNMKAPRIEEDYTSYFPKYGYRNGVGRPEGIVVHDTANDNSTIDGEIAFMKRNYTNAFVHAFVDGNRIIETAPTDYLSWGAGPYGNQRFINVEIVHTHDYDSFARSMNNYADYAATQLQYYNLKPDSAENDGRGTVWTHAAISNFLGGTDHADPHQYLRSHNYSYAELYDLIYEKYLIKTKQVAPWGTTSTKPSQPSKPSGGTNNKLTVSANRGVAQIKPTNNGLYTTVYDSKGHKTDQVQKTLSVTKTATLGNNKFYLVEDYNSGKKYGWVKQGDVVYNTAKAPVKVNQTYNVKAGSTLYTVPWGTPKQVASKVSGTGNQTFKATKQQQIDKATYLYGTVNGKSGWISKYYLTTASKPSNPTKPSTNNQLTVTNNSGVAQINAKNSGLYTTVYDTKGKTTNQIQRTLSVTKAATLGDKKFYLVGDYNTGTNYGWVKQDEVIYNTAKSPVKINQTYNVKPGVKLHTVPWGTYNQVAGTVSGKGDQTFKATKQQQIDKATYLYGTVNGKSGWISKYYLTAPSKVQALSTQSTPAPKQVKPSTQTVNQIAQVKANNSGIRASVYDKTAKSGTKYANRTFLINKQRTQGNNTYVLLQDGTSNTPLGWVNINDVTTQNIGKQTQSIGKYSVKPTNNGLYSIAWGTKNQQLLAPNTLANQAFNASKAVYVGKDLYLYGTVNNRTGWIAAKDLIQNSTDAQSTPYNYTFVINNSKSYFYMDPTKANRYSLKPYYEQTFTVIKQKNINGVKWYYGQLLDGKYVWIKSTDLVKEKIKYAYTGMTLNNAINIQSRLKYKPQVQNEPLKWSNANYSQIKNAMDTKRLANDSSLKYQFLRLDQPQYLSAQALNKLLKGKGVLENQGAAFSQAARKYGLNEIYLISHALVETGNGTSQLAKGGDVSKGKFTTKTGHKYHNVFGIGAFDNNALVDGIKYAKNAGWTSVSKAIIGGAKFIGNSYVKAGQNTLYKMRWNPANPGTHQYATDINWANVNAQVLKQFYDKIGEVGKYFEIPTYK

SEQ ID NO: 279 - protein, 433 aa, Staphylococcus epidermidis
VAFEFRLPDIGEGIHEGEIVKWFIKAGDTIEEDDVLAEVQNDKSVVEIPSPVSGTVEEVLVDEGTVAVVGDVIVKIDAPDAEEMQFKGHGDDEDSKKEEKEQESPVQEEASSTQSQEKTEVDESKTVKAMPSVRKYARENGVNIKAVNGSGKNGRITKEDIDAYLNGGSSEEGSNTSAASESTSSDVVNASATQALPEGDFPETTEKIPAMRKAIAKAMVNSKHTAPHVTLMDEIDVQELWDHRKKFKEIAAEQGTKLTFLPYVVKALVSALKKYPALNTSFNEEAGEVVHKHYWNIGIAADTDKGLLVPVVKHADRKSIFEISDEINELAVKARDGKLTSEEMKGATCTISNIGSAGGQWFTPVINHPEVAILGIGRIAQKPIVKDGEIVAAPVLALSLSFDHRQIDGATGQNAMNHIKRLLNNPELLLMEG

SEQ ID NO: 280 - protein, 736 aa, Staphylococcus epidermidis
MNETDEISQIYNKHRLPSLSGLAKVSPLVHRASIGGVLNVAELNRIKRLVQVQNQFKTFYNQMLEEDEEVKYPILHDKMNHLPILTDLFKEINETCDAHDLFDHASYTLQSIRSKISRTNQRIRQNLDRIVKNQGNQKKLSDAIVTVRNDRNVIPVKAEYRQDFNGIVHDQSASGQTLYIEPNSVVEMNNQISRLRNDEAVERERILTELTGFVSAEADALLIAESVMGQIDFLIAKARYARTIKGTKPTFKEDRTIYLPNAFHPLLDKDTVVANTIEFIDDVETVIITGPNTGGKTVTLKTLGLIIVMAQSGLLIPTLDGSQLSIFENVYCDIGDEQSIEQSLSTFSSHMKNIVEILQDADQNSLILFDELGAGTDPSEGAALAMSILDYVRRLGSLVMATTHYPELKAYSYNREGVMNASVEFDVETLSPTYKLLMGVPGRSNAFDISKKLGLSLNIINKAKTMIGTDEQEINAMIESLEQNSKRVDQQRIELDRLVREAQQTHDALSKQYQQYQNYETSLMDEAKEKANQRVKSATKEADEILKELRNLRDHKGAEVKEHELIDKKKQLDDQYEVKSIKQHVQKKKYDTIHTGDEVKVLSYGQKGEVLELVGDEEAVVQMGIIKMKLPIEDLEKTKKKKEKPTKMVTRQNRQTIKTELDLRGYRYEEALNELDQYLDQAVLSNYEQVYIIHGKGTGALQKGVQQHLKKHKSVRQFRGGMPSEGGFGVTVAELK

SEQ ID NO: 281 - protein, 408 aa, Staphylococcus epidermidis
MSFFKRLKDKFSSKNEDDIQKDLDESVDSNVNSDSDSMDPNDSDEQVKPKKKPKKLSEADFDEDGLISIEDFEEIEAQKIGAKFKAGLEKSRQNFQEQLNNLIARYRKVDEDFFEALEEMLITADVGFNTVMKLTDELRTEAQRRNIQETEDLREVIVEKIVEIYHQEDDHSEAMNIEDGRLNVILMVGVNGVGKTTTIGKLAYRYQQEGKKVMLAAGDTFRAGAIQQLNVWGERVGVEVVSQNEGSDPAAVVYDAINAAKNKDVDILICDTAGRLQNKSNLMQELDKMKRVINRAIPDAPHEALLCLDATTGQNALSQARSFKEVTNVSGIVLTKLDGTAKGGIVLAIRNELHIPVKYVGLGEKMDDLQPFSPESYVYGLFADMIEQNEDIPEEISRNSSVESEEGN

SEQ ID NO: 282 - protein, 551 aa, Staphylococcus epidermidis
MKRNWWKEAVAYQVYPRSFNDSNGDGIGDLPGLIEKLDYLENLGIDVIWLSPMYPSPNDDNGYDISDYKGIMSEFGTMNDFDQLLSSIHQRGMKLILDLVVNHTSDEHPWFIESKSSKTNAKRDWYIWADPKPDGSEPNNWESIFNGSTWEFDESTKQYYFHLFSKKQPDLNWENPDVRQAVFEMMNWWFEKGIDGFRVDAITHIKKNFEAGDLPVPDGKKFAPAFDVDMNQPGIQEWLQEMKDKSLSRYDIMTVGEANGVTPNDAEEWVGEENGKFNMIFQFEHLGLWSTGDTKFDVKSYKQVLNRWQKQLENVGWNALFIENHDQPRRVSTWGDDKNYWYESATSHATAYFLQQGTPFIYQGQEIGMTNYPFESIESFNDVAVKTEYQIVKKEGGDVNQLLDKYKMENRDNARTPMQWNNSINAGFTTGKPWFHVNPNYTEINVKQQLNDKFSILSYYKALIQLKKSDLIYTYGKFNMVDAENKQVFAYTRTFKNNTVLIVANLTNEVSELNLPFELDISSVDIKLHNYHLNDINLDHIKPYESFVVEI

SEQ ID NO: 283 - protein, 474 aa, Staphylococcus epidermidis
LSHRKLFPSIFHLYQQDNLDEHIAIIGIGRRDYNNEQFRDQVKASIQTYVKDTDRIDEFMTHVFYHKTDVSDKESYQSLLQFSERLDSEFALGGNRLFYLAMAPQFFGVISDYLKSSGLTQTTGFKRLVIEKPFGSDLKSAESLNNQIRRSFKEEEIYRIDHYLGKDMVQNIEVLRFANAMFEPLWNNKYISNIQVTSSEVLGVEDRGGYYESSGALKDMVQNHMLQMVALLAMEAPISLNSEDIRAEKVKVLKSLRQLKPEEVKKNFVRGQYDQGNIDGKQVKSYREEDRVAKDSVTPTFVSGKLTIDNFRWAGVPFYIRTGKRMKSKTIQVVVEFKEVPMNLYYETDNLLDSNLLVINIQPNEGISLHLNAKKNIQGIDTEPVQLSYAMSAQDKMNTVDAYENLLFDCLKGDATNFTHWEELKSTWKFVDAIQDQWTMVEPCFPNYEAGTNGPLESDLLLSRDGNHWWDDIH

SEQ ID NO: 284 - protein, 142 aa, Staphylococcus epidermidis
MIKKNKEELNDMEYLVTQENGTEPPFQNEYWNHFEKGIYVDKLSGKPLFTSEDKFESNCGWPSFSKALNDDEIVELVDKSFGMIRTEVRSEKANSHLGHVFNDGPKEKGGLRYCINSAAIQFIPYDKLEELGYGDLIKHFKK

SEQ ID NO: 285 - protein, 266 aa, Staphylococcus epidermidis
LKKLAFAITAASGAAAVLSHHDAEASTQHKVQSGESLWTIAQQYNTSVESIKQNNNLSNNMVFPGQVINVGGSASQNTSSNTSSSSASSHTVVAGESLNIIANKYGVSVDALMQANHLNGYLIMPNQILTIPNGGSGSGSGGTATQTSGNYTSPSFNHQNLYTEGQCTWYVFDKRSQAGKPISTYWSDAKYWASNAANDGYQVDNTPSVGAIMQSTPGPYGHVAYVERINGDGSILISEMNYANGPYNMNYRTIPASEVSSYAFIH

SEQ ID NO: 286 - protein, 216 aa, Staphylococcus epidermidis
MARIATKLGYPESNSFVTNTVIEFVLHNEAYPRLYRIKTRDTNLIKISQANEISRQITNGTMTLEEAKYQLEEIYVAKRDSSLPFKGIAAAIIATSFLYLQGGRLVDIITAVLAGTIGYLVVEILDRKLHAQFIPEFIGSLVIGIISVIGHAFVPSGDLATIIIAAVMPIVPGVLITNAIQDLFGGHMLMFTTKSLEALVTAFGIGAGVSSILILV

SEQ ID NO: 287 - protein, 292 aa, Staphylococcus epidermidis
MTEFDLSTREGRWKHFGSVDPVKGTKPTTKNEMTDLQSTHKNFLFEIEEVGIKNLTYPVLIDQYQTAGLFSFSTSLNKNEKGINMSRILESVEKHYDNGIELEFNTLHQLLRTLQDKMNQNAAGVDVSGKWFFDRYSPVTHIKAVGHADVTYGLAIENHTVTRKELTIQAKVTTLCPCSKEISEYSAHNQRGIVTVKAYLDKNNDVIDDYKNKILDAMEANASSILYPILKRPDEKRVTERAYENPRFVEDLIRLIAADLVEFDWIEGFDIECRNEESIHQHDAFARLKYRK

SEQ ID NO: 288 - protein, 324 aa, Staphylococcus epidermidis
VQKKYITAIIGTTALSALASTHAQAATTHTVKSGESVWSISHKYGISIAKLKSLNGLTSNLIFPNQVLKVSGSSSRATSTNSGTVYTVKAGDSLSSIAAKYGTTYQKIMQLNGLNNYLIFPGQKLKVSGKATSSSRAKASGSSGRTATYTVKYGDSLSAIASKYGTTYQKIMQLNGLTNFFIYPGQKLKVPGGSSSSSSSNNTRSNGGYYSPTFNHQNLYTWGQCTWHVFNRRAEIGKGISTYWWNANNWDNASAADGYTIDYRPTVGSIAQTDAGYYGHVAFVERVNSDGSILVSEMNWSAAPGNMTYRTIPAYQVRNYKFIH

SEQ ID NO: 289 - protein, 439 aa, Staphylococcus epidermidis
VTKKAFISYSRTSDEHLNRVVRIGESLRVDHGIDVILDVWDCTEGDDLNFFMESMVNDETIDFVIILSDFQYFNRANDREGGVGKESTIITSQIYDKQKDSKFIPVFLDILDNGKPSLPTFCNTRFAIDMTDIELDIEKIEEIARKIHDKPLFEKPRLGKVPDYNQNQNELKKAIKKLTLSKSYNETRNFEEALDIIYKTLENIENSVEEYNKDDLMTLKEVFDTWKEFITYALNNDNFYFRELIIEHYNRCLKLTEEEFENPMTRIFNYFSFLILVSESLSSGANEFLKDLLNAKFHFSRREANYYILSLYPQVLSKKYSYNTNVKKMLAEMYFEGKELKKVQDADVILYTESLMKKDIHSVYETWHGVLLYSRWPMLEQQTINILINKFRSKKYLDQFDFLFGSSQREVFENYDKIKSTQEIPTIFNFIDKEEIGSY

SEQ ID NO: 290 - protein, 253 aa, Staphylococcus epidermidis
MHYLKKVTIYISLLILVSGCGDSKETEIKQNFNKMLNVYPTKNLEDFYDKEGYRDEEFDKDDKGTWIIRSEMTKQPKGKIMTSKGMVLHMNRNTRSTTGYYVIRKISEDNKSEIDDEEKKYPIKMVNNKIIPTQKINDNKLKNEIENFKFFVQYGSFKNSDDYKEGDIEYNPNAPNYSAQYHLSNDDYNIKQLRKRYDIKTKKTPRLLMRGAGDPKGSSVGYKNLEFTFVKNNEENIYFTDSINFNPSKGKSL

SEQ ID NO: 291 - protein, 261 aa, Staphylococcus epidermidis
VKHSKKLLLCISFLLITFFIGGCGFMNKDDGKETEIKQNFNKMLNVYPTKNLENFYDKEGYRDEEFDKDDKGTWIVHSKMVIEPKGKNMESRGMVLFINRNTRTSKGYFIVNEIEKDRKGRPINNKKKYPVKMKNNKIIPTKPISNDKLKKEIENFKFFVQYGNFKDIKNYKDGDISYNPNVPSYSAKYQLSNNEYNVQQLRKRYDIPTKKVPKLLLKGDGDLKGSSVGSKNLEFTFIENKEENIYFTDSVLFSPSEDNES

SEQ ID NO: 292 - protein, 253 aa, Staphylococcus epidermidis
MRYLKKVTIYISLLILVSGCGNGKETEIKQNFNKMLDMYPTKNLEDFYDKEGYRDEEFDKKDKGTWIVGSTMTIEPKGKYMESRGMFLYINRNTRTTKGYYYVRKTTDDSKGRLKDDEKRYPVKMEHNKIIPTKPIPNDKLKKEIENFKFFVQYGDFKNLKDYKDGDISYNPNVPSYSAKYQLSNNDYNVKQLRKRYDIPTNQAPKLLLKGDGDLKGSSIGSKSLEFTFIENKEENIFFSDGVQFTPSEDSES

SEQ ID NO: 293 - protein, 259 aa, Staphylococcus epidermidis
MKHSSKIIVFVSFLILTIFIGGCGFINKEDSKEAEIKQNFNKTLSMYPTKNLEDFYDKEGYRDEEFDKDDKGTWIINSKMIVEPKGEEMEARGMVLRINRNTRTAKGNFIIKRITENNKGIPDVKDKKYPVKMEHNKIIPTKQIKDKKLKKEIENFKFFVQYGNFKNLKDYKDGEISYNPNVPSYSAQYQLNNYDNNVKQLRKRYDIPTNQAPKLLLKGTGDLKGSSVGYKHLEFTFVENKKENIYFTDSINFNPSRGN

SEQ ID NO: 294 - protein, 261 aa, Staphylococcus epidermidis
MRYLKKVTIYISLLILTIFIGGCGFINKEDSKETEIKQNFNKMLNVYPTKNLEDFYDKEGFRDEEFDKGDKGTWIIRSEMTKQPKGKIMTSRGMVLYINRNTRTAKGYFLIDEIKDDNSGRPIENEKKYPVKMNHNKIFPTKPISDDKLKKEIENFKFFVQYGDFKNLKDYKDGEISYNPNVPSYSAQYQLNNNDNNVKQLRKRYDIPTNQAPKLLLKGDGDLKGSSVGSKNLEFTFVENKEENIFFTDAVQFTPSEDDES

SEQ ID NO: 295 - protein, 512 aa, Staphylococcus epidermidis
MKTYKPYRHQLRRSLFASTIFPVFMVMIIGLISFYAIYIWVEHRTIHQHTYQTQTELQRIDKHFHTFVTQQQKQWRHVDLSHPTDITKMKRQLLKQVHQQPAILYYDLKGSSQSFTNNYEQLDTTKMYLISKYRIDFKDDTYILKIYMSSTPLLKNIKKNSGQSALIVDSYDTVLYTNDDRFSIGQKYQPPQFGFMNESLKLNSHHAHLIIYKDIHETIEDGIALLVVMGVVLILLVIFGYISADRMAKRQSEDIEAIVRKIDDAKNRHLGSYEPLKKHSELEEINNYIYDLFESNEQLIQSIEQTERRLRDIQLKEIERQFQPHFLFNTMQTIQYLIPLSPKVAQTVIQQLSQMLRYSLRTASHTVKLAEELSYIQQYVAIQNIRFDDMIQLYIDAPEDVQHQTIGKMMLQPLVENAIKHGRGSEPLKITIRIRLTKRKLHILVHDNGIGMSPSHLERVRQSLHHDVFDTTHLGLNHLHNRAIIQYGTYARLHIFSRSHQGTLMCYQIPLV

SEQ ID NO: 296 - protein, 1030 aa, Staphylococcus epidermidis
  MOD_RES (269)..(271): X = anything
VDDVTKYGPVDGDPITSTEEIPFDKKREFDPNLAPGTEKVVQKGEPGTKTITTPTTKNPLTGEKVGEGEPTEKITKQPVDEIVHYGGEEIKTGHKDEFDPNAPKGSQTTQPGKPGVKNPDTGEVVTPPVDDVTKYGPVDGDPITSTEEIPFDKKREFDPNLAPGTEKVVQKGEPGTKTITTPTTKNPLTGEKVGEGEPTEKITKQPVDEIVHYGGEEIKPGHKDEFDPNAPKGSQEDVPGKPGVKNPDTGEVVTPPVDDVTKYGPVDGDXITSTEEIPFDKKREFDPNLAPGTEKVVQKGEPGTKTITTPTTKNPLTGEKVGEGEPTEKITKQPVDEITEYGGEEIKPGHKDEFDPNAPKGSQEDVPGKPGVKNPDTGEVVTPPVDDVTKYGPVDGDPITSTEEIPFDKKREFDPNLAPGTEKVVQKGEPGTKTITTPTTKNPLTGEKVGEGEPTEKITKQPVDEIVHYGGEEIKTGHKDEFDPNAPKGSQTTQPGKPGVKNPDTGEVVTPPVDDVTKYGPVDGDPITSTEEIPFDKKREFDPNLAPGTEKVVQKGEPGTKTITTPTTKNPLTGEKVGEGEPTEKITKQPVDEIVHYGGEEIKPGHKDEFDPNAPKGSQEDVPGKPGVKNPDTGEVVTPPVDDVTKYGPVDGDSITSTEEIPFDKKREFDPNLAPGTEKVVQKGEPGTKTITTPTTKNPLTGEKVGEGEPTEKITKQPVDEIVHYGGEQIPQGHKDEFDPNAPVDSKTEVPGKPGVKNPDTGEVVTPPVDDVTKYGPVDGDSITSTEEIPFDKKREFDPNLAPGTEKVVQKGEPGTKTITTPTTKNPLTGEKVGEGKSTEKVTKQPVDEIVEYGPTKAEPGKPAEPGKPAEPGKPAEPGTPAEPGKPAEPGTPAEPGKPAEPGKPAEPGKPAEPGKPAEPGTPAEPGTPAEPGKPAEPGTPAEPGKPAEPGTPAEPGKPAESGKPVEPGTPAQSGAPEQPNRSMHSTDNKNQLPDTGENRQANEGTLVGSLLAIVGSLFIFGRRKKGNEK

SEQ ID NO: 297 - DNA, 1164 bp, Staphylococcus aureus
atgaataaacagatttttgtcttatattttaatattttcttgatttttttaggtatcggtttagtaataccagtcttgcctgtttatttaaaagatttgggattaactggtagtgatttaggattactagttgctgcttttgcgttatctcaaatgattatatcgccgtttggtggtacgctagctgacaaattagggaagaaattaattatatgtataggattaattttgttttcagtgtcagaatttatgtttgcagttggccacaatttttcggtattgatgttatcgagagtgattggtggtatgagtgctggtatggtaatgcctggtgtgacaggtttaatagctgacatttcaccaagccatcaaaaagcaaaaaactttggctacatgtcagcgattatcaattctggattcattttaggaccagggattggtggatttatggcagaagtttcacatcgtatgccattttactttgcaggagcattaggtattctagcatttataatgtcaattgtattgattcacgatccgaaaaagtctacgacaagtggtttccaaaagttagagccacaattgctaacgaaaattaactggaaagtgtttattacaccagttattttaacacttgtattatcgtttggtttatctgcatttgaaacattgtattcactatacacagctgacaaggtaaattattcacctaaagatatttcgattgctattacgggtggcggtatatttggggcacttttccaaatctatttcttcgataaatttatgaagtatttctcagagttaacatttatagcttggtcattattatattcagttgttgtcttaatattattagtttttgctaatgactattggtcaataatgttaatcagttttgttgtcttcataggttttgatatgatacgaccagccattacaaattatttttctaatattgctggagaaaggcaaggctttgcaggcggattgaactcgacattcactagtatgggtaatttcataggtcctttaatcgcaggtgcgttatttgatgtacacattgaagcaccaatttatatggctataggtgtttcattagcaggtgttgttattgttttaattgaaaagcaacatagagcaaaattgaaagaacaaaatatg

SEQ ID NO: 298 - DNA, 492 bp, Staphylococcus aureus
atgctattttatttatttcattttacaatcagctttatatcaacagtacttttctctatcattttcaatgcacccaaacgcctcttagtagcatgtggatttgtgggtgccattgcatggacgatttaccaattaacggtagatttagagtttggaaaagttggcgcttcatttttgggaagcttaattttaggcttaatgagtcatactatgagtcgcagatataaacgaccggtaattatattcatagtgccaggcattataccattagtacctggtggtgcagcttatcaagcgactcgttttttagtatcaaatgattatacaagtgctgtaaatacatttttagaagttacactgatttcaggtgcgattgctttcggtatattagtttctgaaattctatattacctatacacacgtatcaaacaactgtatggtaaaatcaaaggtaagacatataaaaaatcttacaacatgaataatagagtt

SEQ ID NO: 299 - DNA, 1314 bp, Staphylococcus aureus
atgataaatgcagtagtaatagcagtaattttaatgattatgctatgtttatgtcgattaaacgtagttataagcttatttatcagtgcgctagttggtggcttaatttcaggcatgagcattgaaaaagttataaatgtatttgggaaaaatatagtcgatggtgctgaggtagcattaagctatgctttattaggtggatttgcagcattaatttcatacagtggtatcacagactatttagtaggaaaaattataaatgcaattcacgctgaaaatagtcgatggtcaagagttaaagtcaaagtgacaataatcattgcattattagctatgagtatcatgagtcaaaacttaattcctgtacatattgcattcattccaattgtcatcccaccattgttaagtctgtttaatgacttaaaaatagatagacgtttaatcggtttgattatcggttttggtttatgtttcccgtatgtgttattaccatatggattcggtcaaattttccagcaaattattcaaagtggctttgcaaaggcaaatcacccaattgagtttaatatgatttggaaagcaatgcttattccttcaatggggtatattgttggcttacttatcggtttatatgtatatcgtaaaccacgtgaatatgaaacacgtaaaatttcagatagtgacaatgttacagagttaaaaccatatatcttaatagtaacaattgtagcaatactagctacatttttagtacaaacatttacagattcaatgatttttggtgcactggcaggggtactcgtattctttatttcacgtgcatataattggtatgaattagatgctaagtttgttgaaggtattaaaattatggcttatattggtgtagttattttaacagcaaatggatttgctggtgtaatgaatgctactggtgatatagatgaattagttaaaactttaacaagtattactggtgataataaattatttagcattatcatgatgtatgtgataggtttaattgtcactttaggtattggatcatcatttgcaacaattcctattatcgcatcattattcattccttttggagcgtcaattggactagatacaatggcattaatcgcattgattggaacagcgagtgcattaggtgactcaggttcgcctgcaagtgattcaacattaggaccaactgcgggattaaatgttgatggccaacatgatcatatacgtgatacatgtgtaccaaacttcttgttttataatattcctttaatgattttcggtactattgctgctatggtacta

SEQ ID NO: 300 - DNA, 291 bp, Staphylococcus aureus
atgaatcataatgttattatcgttattgcattaatcatagttgtcatttctatgttagctatgctcattcgcgttgtgctaggcccatcacttgccgatcgtgttgtcgcattagatgcgattggtcttcaattaatggcagttatagcattattcagtattttattaaatattaaatacatgattgtcgttattatgatgattggtatattagcttttttaggtactgcagtattctctaaatttatggacaaaggtaaggtgattgaacatgatcaaaatcatactgat

SEQ ID NO: 301 - DNA, 957 bp, Staphylococcus aureus
gtgaataggaatatcgttaaactagttgtgttcatgctaattttagttgtagcagtagcgggttgtggtcaaaaagatactgaagagaaaactgaaatgacgacaataaaagatgaattaggaactgaaaaaattaagaaaaatcctaaacgtgttgttgtattagaatatagttttgctgattatttagcagcattagatatgaaacctgttggtattgcagatgatggcagcactaaaaatataacaaagtcagtaagagataagattggggcatatgaatcggttggatctagaccgcaaccgaatatggaagtgataagtaaattaaaaccggatttgatcattgcagatgttagcagacataagaaaatcaaatcagaattgagcaaaattgctccgacaatcatgttagttagcggtacgggagattataatgcaaatattgaagcatttaaaacagtcgctaaagcagtaggcaaagagaaagaaggcgagaagcgtctggaaaagcatgataaaatattagcggagattagaaagaaaattgaacagagtacgttaaaatctgcatttgcattcggtatctcaagagcaggtatgtttattaataatgaagatacatttatgggacaattcttaattaaaatgggtattcaacctgaagtcacaaaagacaaaactacgcatgttggtgaacgcaagggtggtccttatatatatttaaataatgaagaacttgccaatatcaatccaaaagttatgattttagccactgacggaaaaacggacaaaaatagaacgaaattcattgatcctgcagtttggaaatcattaaaagctgtgaaagataacaaagtttatgacgttgaccgaaataagtggttgaaatcaagggggattatcgcaagtgaaagtatggcagaagatttagaaaaaattgcagaaaaagcaaaa

SEQ ID NO: 302 - DNA, 1017 bp, Staphylococcus aureus
atgactggagaacaatttactcaaattaaacgtccagtaagtagattaactgaaaaagttctaggttggttatgttgggtgatgttattagtgcttactgtcattacgatgtttatagcacttgtttcattcagtaataacacatcgattgctaatcttgaaaatacattaaacaataatgcatttatccagcaattattagctggaaatggctataatacaacacaatttgtaatatggttacaaaatggtatatgggctattatcgtttactttattgtttgtttgttgatttcatttttagctctcatatctatgaatataagaatcttgtcaggtttcttattcttaatatcagcaattgtaacgattcctttagttttacttatcgttactttaatcattccgatattattctttattattgcgatgatgctatttataagaaaagataaagttgaaatggttgcgccacaatattatgaagagtataacggaccgatttatgattatcgtgaacctgtgtatgagcgcccccaaccgaaagatgattattatgatgtgcctaaatatgaaaaagaattggataaatcaaatactgtatatgatcaagaacaggaaagagataaatatgatcaatttcctaaacgtgcagttgaaagtgaatataatcatgatgagcgcactgaggaagaaccatcagtattatccagacaggctaaatacaaacaaaaaagtactgaagaactaggtattgaagatgatggttattatgcagaacctgaagttgatccaaaagaattgaaagcacaacaaaagcgagaaaaagctgaaattaaagctaagaaaaaagaaaaacgtaaagcttataaccaacgaatgaaagaacgtaggaaaaatcaacctagcgcagttagtcaacgtcgaatgaattttgaagagcgacgtcaaatttacaacaatgatatttctgaagaacgcaattcaagtgaagttaaggacaaaaaagagcaagaa

SEQ ID NO: 303 - DNA, 1554 bp, Staphylococcus aureus
gtggaaaatacaattaatgaaagtgaaaagaaaaaacgatttaaattaaaaatgccaggtgcatttatgattttattcattttaacggttgttgcagttatagcaacatgggttattcctgctggtgcatattctaaactttcttacgaaccttcatcccaagaactaaagatagttaaccctcataaccaagtgaaaaaggttccgggtacgcaacaggaactagacaaaatgggggttaaaattaagattgaacaatttaaatcaggtgcaattaataagccggtatcaattccgaatacttatgaaagattaaagcaacatccagctggaccagaacaaataacaagtagcatggttgaaggtacgatagaagcggtcgatatcatggtattcattcttgtactagggggacttattggcgtagttcaagccagtggttcttttgaatcgggattgttagctttaacgaagaaaacaaaagggcatgaatttatgctaattgtgtttgtatcaatactaatgattatcggcgggacattatgtggtattgaagaagaagctgtagcattttatccgattttagtccctatatttatagcgttaggatacgattctatcgtttcagttggtgccatattccttgccagctctgtcggtagtacattttcaactattaacccgttctcggttgtaattgcctctaatgccgctggtacaacttttacggatggcttgtattggagaataggtgcttgtattgtcggtgcgatttttgttattagttatttatattggtactgtaaaaaaattaaaaacgatcctaaagcgtcatattcttatgaagacaaagatgcttttgaacagcaatggtctgtattaaaagatgacgatagtgcccattttactttgcgtaagaagataatccttacattatttgtactaccatttccaattatggtatggggagttatgacgcaaggttggtggttcccagttatggcttcagcatttttaatatttacaattataataatgtttattgctgggacaggtaaatctggattgggagaaaaaggaactgtagatgcatttgtcaatggtgcatcaagtttagtaggtgtatctttaattattggtttagctcgaggtattaatttagtgttgaatgaaggtatgatttcagatacaatcttacacttttcatcatctttagttcaacatatgagtggaccattatttatcatcgtattactatttattttcttctgtttaggttttatcgtgccatcatcttctggcttagcggtattatcaatgcctatctttgcaccactagctgatacagtaggtataccaagattcgtcatcgttacgacatatcaatttggtcaatatgcgatgttattcttagcgccgactggacttgttatggccacactacaaatgttaaacatgcgatattcacattggttccgatttgtatggccggtagttgcttttgtattgattttcggtggcggagtactaattacgcaagtactaatttattca

SEQ ID NO: 304 - DNA, 1248 bp, Staphylococcus aureus
atgagcttttttaaacgcttaaaagataagtttgcaacaaataaagaaaatgaagaagttaaatccttaacagaagaacaaggtcaagacaaattagaagatacacattctgaaggttcaacgcaggacgcaaatgatttagcagaaaatgctgaagtgaaaaagaagccacgcaagttgagtgaagcggattttgatgacgatggcttaatatcaattgaagattttgaagaaattgaagctcaaaaaatgggtgctaaatttaaagcaggactcgaaaaatctcgtcaaaatttccaagaacaattaaataatttgatagcgagatatcgtaaagtagatgaagacttttttgaagctttagaagaaatgttaatcactgcagacgtcggttttaatacagtgatgacgttaactgaagaattacgtatggaagcacaacgacgtaatattcaagatactgaagatttgcgtgaagtcattgttgaaaaaatcgtagagatttaccatcaagaagatgataattcagaagctatgaacttagaagatggtcgtttaaatgtcattttaatggttggtgtgaatggtgttggtaaaacaacaacaattggaaaattagcttaccgatataaaatggaaggtaaaaaagtaatgttagctgcgggcgatacttttagagcgggtgctattgatcaattgaaagtttggggcgaacgtgttggtgtagacgtaattagccaaagtgaaggttctgatccagctgctgttatgtatgatgcgattaatgccgctaaaaacaaaggtgttgatattttaatctgtgataccgctggacgtttacaaaataaaacaaatctaatgcaagaattagaaaaagttaagcgtgtaattaatcgagcagtgccagatgcgcctcatgaagcattactatgtttagatgctacaactggtcagaatgcgttgtcacaagctagaaactttaaagaagtaacaaatgttacaggtattgtattaacgaaattagatggtacagccaaaggtggtatcgtattagccattcgtaatgaattgcacatcccagttaaatatgtaggtttaggtgagcaattagatgacttacaaccatttaaccctgaaagttatgtctacggcttattcgctgatatgattgaacaaaatgaagaaataacaacagttgaaaatgatcaaattgtaacagaagaaaaggacgataatcatgggtcaaaa

SEQ ID NO: 305 - DNA, 2604 bp, Staphylococcus aureus
gtgttaaaaaagtggctaaattcaaacgtcaaacaattctttgttataactttcattagtgtaatattaacgcttattttattttctactcatatctatgattatattgtgaatggtactgtttttagcggggctggagatggattccgtcaaatgatgccatttcaaatgtatttgtatgaacatctacgtagtttttctagtttatatgatgcatcgtttggattaggtggcgattatatgaaaggactatcatattattattcgctgtcacctttaatgtggctaaattttctattcattaaaataggagaaacggttggtatatttaatccgacgacaatacatttttggccgacaaaccaacttattatggctatgatacgagctatcataacatttgtcgtgaccttctacttatttaaaatattacactttaaacgctcagcaaatatgatcgctacgattttatacggcatgtcaactgtcgttatatactttaattttacttggtcattttatggaaatttattatatttattgccattatcgattcttggtttggaaagatattttcaacaacgcaaaatcggtattttcattgttgcgatagccttaacactatttagcaatttttatttcagttattatcaagctattattataggttgctactatttatatcgactcattttcacttacaaatatgacattgtctctagaacacaaaaattaatttgcgtcatatctgctacagttttgagtgtgttatcaagtgtatttggtttattcactggcatttctgcgtttttggaaaatgacagaaagcaaaatcccaatgttgatataccgtttttgacaccacttgattatcattattttttctttagcgatggattttatattacgatttcaattcttactatcgttgcattattgtcattcaaactgtatcgtttttacttttatagacttttcgcaatagtaacatggatattatttataggttcattatcacagtatttcgacagtgcttttaatggtttttcatttccagaaaggcgttgggtgtatatcttagcactatcatcaagtgctctttgcggattgtttattcaacatttatcaacattaaatatgaaatattatttaatcagaacaatacccgtatgcatcatcgcaatactttatgtattactatcaccgacacacccacttgcacttatagtaggtattatcctgctaatagtgcttgccgttattttaaaatttagtttatggcgttataaaaaattaaccgttgcaatattagtattaatcgttatgattcaacaaatcgtcattttagataacaacaaaaacatggcaatcaaaccttatcaacaatcattatcaacgttgaaacaacatgattaccatagtaactatgtaaaccagcttataaaaaagataaatcaaaatgcaacaggctcatttaatcgcattgattatatgtcagactatgcattaaattcaccatttatatatcattataatggcatttcattatattctagtatttttaatggagacattttaaaatattatgacaagacactccaaattaatatgccaatcgataaaaacagcacttatagattacttggcaatcgtcaaaatttactatcactttggaatgttaatgatcgaattagagtgaatcatgatgacaacttaccatatggatttaaaattaagtctgaacacaaagacaataaagttcgttggattcattctaaaaataccatccattatccaagtgcacatattacaaataaggtcttttccaataaagaattaaaatctccattagataaagaacaagcaatgttgcaagggattgtttctaacaatattaaagatgttaatacacattttaaagccaataaaaatttactatcagattcaacaattaaattaaatagtgcagcctggcaatctcctacaaaacatttattacaagttaaacaaaataatggtggtctaactgtacagttgccaaaatcagtttctaatcaatttaaagatttgtattttgaaatggatttagaattactttcgccggataaagctcatgatgttaaagtgaatgaatatacacaagaaagaaataaactcacttataaatatcgacgcgttgtaacacccgtaacgatacgcattaaagctccagatagaattagattatcattgcctaaaggtaagtatcgagtaaatttaaaagggatatacggcgaagattataccacgcttaaagacgcttcaaattcattagaagctgtcaaagttagtaagacaaagcatggttatactattactaaaaataaaaattcatctgggtatattgttttgccaacagcatataatcaaggtatgaaagcgacatcaggtgatcaaagtcttaaagttgaacaagtaaatggtgttatgaccggcattaaagcacctaaaaatataacaaagattcaattgagctataccccaccatactattatttacttataacaattactatatttggcattatatgtagtattattttcacgagatgggcaagacaaaaa

SEQ ID NO: 306 - DNA, 2376 bp, Staphylococcus aureus
gtgcgtcaattggcacaagcaaaaaagaaatcgacagctaagaaaaaaacaacatcaaaaaaaagaacaaattcgaggaaaaagaagaatgataatccgatacgttatgtcatagctattttagtagttgtattaatggtgttgggtgttttccaattaggaataataggtcgtctaattgacagcttctttaattatttatttgggtacagtagatatttaacatatattttagtactcttagcaactggttttattacatactctaaacgtattcctaaaactagacgaacggctggttcgattgtattgcaaattgcattgctatttgtatcacagttagtttttcattttaatagtggtatcaaagctgaaagagaacctgtactttcttatgtgtatcagtcataccaacacagtcatttcccaaattttggtggcggtgtattaggcttttatttattagagttaagcgtacctttaatttcattatttggtgtatgtattattactattttattattatgctcaagtgttattttattaacaaaccatcaacatcgtgaagttgcaaaagttgcactggaaaatataaaagcttggtttggttcatttaatgaaaaaatgtcggaaagaaaccaagaaaaacaattgaagcgtgaagaaaaagcaagacttaaagaagaacaaaaggcacgtcaaaatgaacagccacaaataaaagatgtgagtgattttacggaagtgcctcaagaaagagatattccaatttatgggcatactgaaaatgaaagtaaaagccagagtcaaccaagtcgaaaaaaacgagtgtttgatgcagagaatagttcgaataacatcgtaaatcatcatcaagcagatcagcaagaacaattaacagaacaaactcataacagtgttgaaagtgaaaacactattgaagaagctggtgaagttacgaatgtatcgtatgttgttccaccgttaactttacttaatcaacctgcaaaacaaaaagcaacatctaaagctgaagtgcaacgtaaaggacaagtactagagaatacattaaaagattttggggtaaatgcaaaagtgacacaaattaaaattggtcctgcagtaactcaatatgaaattcaaccagctcaaggggttaaagtgagtaaaattgtaaacttgcataatgatattgcattagctttagcagcaaaagatgttagaatcgaagcgccaatacctggtcgttctgcagtaggtattgaagtgccaaatgagaaaatttcattagtttcactaaaagaagttttagatgaaaaattcccgtctaataataaactagaagttggattaggaagagatatatcaggtgatccaattactgttccactaaatgaaatgccacacttattggtggcaggatcgacgggtagtggtaaatctgtttgtataaatggtattattacaagtattttattaaatgctaagccgcatgaagttaaacttatgttaatcgatccgaaaatggttgaactaaatgtttataacggaattccacacttattaattccggttgttacaaatcctcataaagctgctcaagctttagaaaaaattgtagctgagatggaaagacgttatgatttattccaacattcatcaactagaaacattaaaggttataacgaattaatccgtaagcaaaatcaagaattagatgagaagcaaccagaattaccttatatcgttgttattgtagatgagcttgcagatttaatgatggtagctggtaaagaagttgaaaatgcgattcaacgtattacacaaatggcacgtgcagcaggtatacatttaattgtagcgacacaaagaccttctgtggatgtaattacaggtatcattaaaaataatattccatctagaatagcttttgctgtgagttctcaaacagattcaagaactattattggtactggcggcgcagaaaagttacttggtaaaggtgacatgttatacgttggaaatggtgactcatcacaaacacgtattcaaggggcgtttttaagtgaccaagaggtgcaagatgttgtaaattatgtagtagaacaacaacaggcaaattatgtaaaagaaatggaaccagatgcaccagtggataaatcggaaatgaaaagtgaagatgctttatatgatgaagcgtatttgtttgttgttgaacaacaaaaggcaagtacatcattgttacaacgccaatttagaattggttataatagagcatctaggttgatggatgatttagaacgcaatcaggtaatcggtccacaaaaaggaagcaagcctagacaagttttaatagatcttaataatgacgaggtg

SEQ ID NO: 307 - DNA, 1359 bp, Staphylococcus aureus
atggctgaaaaattacaaagggaactgagcaatcgccacatacaattaattgcaattggcggtgcaattggtacaggcttattcttaggtgctggtcaaacgattgcattaaccggcccttcaattctattaacatacatcattataggatttatgttatttatgtttatgcgaggtttaggagaaatcattatacagaatactgaatttaaatctttcgcagatgtaaccaatacatatattgggccttttgcaggatttgttaccggatggacatactggttctgttggattattacaggtatggctgaagtaacggctgtggcaaaatatgttagcttttggttcccagaaattccaaactggataagtgcactattttgtgtactgttattaatgtcattcaacctacttagcgcaagacttttcggagaattagaattttggttctctatcattaaaatagcgacaattattggtttaatagtagttggtttcgtcatgattctatttgcatttaaaactcaattcgggcatgccagtttcacaaatctatatgaacacggcatattcgctaaaggtgcttctggattctttatgtctttccaaatggcactattctcatttgtaggaattgaaatgattggtgttacagctggggaaacaaaagatccagttaaaacaattccaaaagcaattaacagtgtacccattagaattttaatattttacgttggggcgttagcggttatcatgtctattatcccttggcagcaagttgatcctgataacagtccattcgtaaaattattcgcattgatcggaattccgtttgctgcgggcttgattaattttgtagtattaaccgctgctgcttcatcatgtaacagtggtatattctcaaatagccgtatgcttttcggtttatcaagtcaacaacaagcacctccgaacttttctaagacgaataaatatggcgttccacatgttgcaatctttgcttcatcagcattattacttgtggcagcattactaaactatattttcccagatgcgacaaaagtatttacgtatgtgactaccatctctacagtgttatttttagttgtatggggtctgattatcattgcatatatcaattatagtcgtaaaaacccagatctacataaaaatgctacgtacaaactattaggtggcaaatatatgggctacttaatatttgtattcttcatttttgtgttcgggttattatttattaatgttgatacaagacgtgcaatttattttattccgatttggtttatacttttagcatttatgtacttaagatataaacgtatcgctgctaaatcaaataaa

SEQ ID NO: 308 - DNA, 6558 bp, Staphylococcus aureus
atgaatttgttaaagaaaaataaatatagtattaggaagtataaagtaggcatattctctactttaatcggaacagttttattactttcaaacccaaatggtgcacaagccttaactacggataataatgtacaaagcgatactaatcaagcaacacctgtaaattcacaagataaagatgttgctaataatagaggtttagcaaatagtgcgcagaatacacctaatcaatctgcaacaaccaatcaagcaacgaatcaagcattggttaatcataataatggtagtatagtaaatcaagctacgccaacatcagtgcaatcaagtacgccttcagcacaaaacaataatcatacagatggcaatacaacagcaactgagacagtgtcaaacgctaataataatgatgtagtgtcgaataataccgcattaaatgtaccaactaaaacaaatgaaaatggttcaggaggacatctaactttaaaggaaattcaagaagatgttcgtcattcttcaaataaaccagagctagttgcaattgctgaaccagcatctaatagaccgaaaaagagaagtagacgtgcggcaccggcagatcctaatgcaactccagcagatccagcggctgcagcggtaggaaacggtggtgaaccagttgcaattacagcgccatatacgccaacaactgatcctaatgccaataatgcaggacaaaatgcacctaacgaagtgctgtcatttgatgacaatggtattagaccaagtaccaaccgttctgtgccaacagtaaacgttgttaataacttgccgggcttcacactaatcaatggtggcaaagtaggggtgtttagtcatgcaatggtaagaacgagcatgtttgattcaggagataataagaactatcaagcacaaggaaatgtaattgcattaggtcgtatacatggaactgatacgaatgaccatggcgattttaatggtatcgagaaagcattaacagtaaatccgaattctgaattaatctttgaatttaatacaatgactactaaaaacggtcaaggcgcaacaaatgttattatcaaaaatgctgatactaatgatacgattgctgaaaagactgttgaaggcggtccaactttgcgtttatttaaagtacctgataatgtgagaaatctcaaaattcaatttgtacctaaaaatgacgcaataacagatgcgcgtggcatttatcaactaaaagatggttacaaatactatagctttgttgactctatcggacttcattctgggtcacatgtttttgttgaaagacgaacaatggatccaacagcaacaaataataaagagtttactgtaacaacatcattaaagaataatggtaattctggtgcttctctagatacaaatgactttgtatatcaagttcaattacctgaaggtgttgaatatgtgaacaattcattgactaaagattttccaagtaacaattcaggcgttgatgttaatgatatgaatgttacatatgatgcagcaaatcgtgtgataacaattaaaagtactggaggaggtacagcaaactctccggcacgacttatgcctgataaaatactcgatttaagatataaattacgtgtaaataatgtgccgacaccaagaacagtaacatttaacgagacattaacgtataaaacatatacacaagatttcattaattcagctgcagaaagtcatactgtaagtacaaatccatatactatcgatatcatcatgaataaagatgcattacaagccgaagttgacagacgtattcaacaagctgattatacatttgcgtcattagatatctttaatggtctgaaacgacgcgcacaaacgattttagatgaaaatcgtaacaatgtaccattaaataaaagagtttctcaagcatatattgattcattaactaatcaaatgcaacatacgttaattcgaagtgttgatgctgaaaatgcagttaataaaaaagttgaccaaatggaagatttagttaatcaaaatgatgaattgacagatgaagaaaaacaagcagcaatacaagttatcgaggaacataaaaatgaaataattggtaatattggtgaccaaacgactgatgatggcgttactagaatcaaagatcaaggtatacagaccttaagtggggatactgcaacaccggttgttaaaccaaatgctaaaaaagcaatacgtgataaagcaacgaaacaaagggaaattatcaatgcaacaccagatgttactgaagacgagattcaagatgcactaaatcaattagctacggatgaaacagatgctattgataatgttacgaatgctactacaaatgctgacgttgaaacagctaaaaataatggcatcaatactattggagcagttgttcctcaagtaactcataaaaaagctgcaagagatgcaattaaccaagcaacagcaacgaaaagacaacaaataaatagtaatagagaagcaactcaggaagagaaaaatgcagcattgaacgaattaactcaagcaaccaaccatgctttagaacaaatcaatcaagcaacaacaaatgctgatgttgataacgccaaaggagatggtctaaatgccattaatccaattgctcctgtaactgttgttaagcaagctgcaagggatgccgtatcacatgatgcacaacaacatatcgcagagatcaatgctaatcctgatgcgactcaagaagaaagacaagcagcaattgacaaagtgaatgctgctgtaactgcagcaaacacaaacattttaaacgctaataccaatgctgatgttgaacaagtaaagacaaatgcgattcaaggaatacaagcaattacaccagctacaaaagtaaaaacagatgcaaaaaatgccatcgataaaagtgcggaaacgcaacataatacgatatttaataataatgatgcgacgctcgaagaacaacaagcagcacaacaattacttgatcaagctgtagccacagcgaagcaaaatattaatgcagcagatacgaatcaagaagttgcacaagcaaaagatcagggcacacaaaatatagtagtgattcaaccggcaacacaagttaaaacggatactcgcaatgttgtaaatgataaagcgcgagaggcgataacaaatatcaatgctacaactggcgcgactcgagaagagaaacaagaagcgataaatcgtgtcaatacacttaaaaatagagcattaactgatattggtgtgacgtctactactgcgatggtcaatagtattagagacgatgcagtcaatcaaatcggcgcagttcaaccgcatgtaacgaagaaacaaactgctacaggtgtattaaatgatttagcaactgctaaaaagcaagaaattaatcaaaacacaaatgcaacaactgaagaaaagcaagtggctttaaatcaagtggatcaagagttagcaacggcaattaataatataaatcaagctgatacaaatgcggaagtagatcaagcgcaacaattaggtacaaaagcaattaatgcgattcagccaaatattgttaaaaaacctgcagcattagcacaaatcaatcagcattataatgctaaattagctgaaatcaatgctacaccagatgcaacgaatgatgagaaaaatgctgcgatcaatactttaaatcaagacagacaacaagctattgaaagtattaaacaagctaacacaaatgcagaagtagaccaagctgcgacagtagcagagaataatatcgatgctgttcaagttgatgtagtaaaaaaacaagcagcgcgagataaaatcactgctgaagtggcgaagcgtattgaagcggttaaacaaacacctaatgcaactgacgaagaaaagcaggctgctgttaatcaaatcaatcaacttaaagatcaagcaattaatcaaattaatcaaaaccaaacaaatgatcaggtagacacaactacaaatcaagcggtaaatgctatagataatgttgaagctgaagtagtaattaaaccaaaggcaattgcagatattgaaaaagctgttaaagaaaagcaacagcaaattgataatagtcttgattcaacagataatgagaaagaagttgcttcacaagcattagctaaagaaaaagaaaaagcacttgcagctattgaccaagctcaaacgaatagtcaggtgaatcaagcagcaacaaatggtgtatcagcgattaaaattattcaacctgaaacaaaagttaaaccagctgcacgtgaaaaaatcaatcaaaaagcgaatgaattacgtgctaagattaatcaggataaagaagcaacagcagaagaaagacaagtagcactagataaaatcaatgaatttgtaaatcaagccatgacagatattacgaataatagaacaaatcaacaagttgatgatacaacaagtcaagcgcttgatagcattgctttagtgacgcctgaccatattgttagagcagctgctagagatgcagttaagcaacaatatgaagctaaaaagcgcgaaattgagcaagcggaacatgcgactgatgaagaaaaacaagttgctttaaatcaattagcgaataatgaaaaacgtgcattacaaaacatcgatcaagcaatagcgaataatgatgtgaaacgtgttgaaacaaatggcattgctacactaaaaggtgtacaacctcatattgtaattaagcctgaagcacaacaagcaataaaagcaagtgcagaaaatcaagtagaatcaataaaagatacaccacatgcaacagttgatgaattagatgaagcgaatcaattaattagcgacacactcaaacaagcgcaacaagaaatagaaaatacaaatcaagatgctgctgttactgatgttagaaatcaaacaatcaaggcaatagagcaaataaaacctaaagtaagacgtaaacgagctgcgcttgatagcattgaagaaaataataaaaatcaactcgatgcaatccgaaatacgttggatactactcaagatgaaagagatgttgctattgatactttaaataaaattgtaaatacaattaaaaatgacattgcacaaaacaaaacgaatgcagaagtggatcgaactgagactgatggcaacgacaacatcaaagtgattttacctaaagttcaagttaaaccagcagcgcgtcaatctgttggtgtaaaagccgaagctcaaaatgcactaatcgatcaaagcgatttatcaactgaagaagaaagactagctgctaaacatttagtagaacaagcacttaatcaggctattgatcagatcaatcatgcagataagactgcccaagttaatcaagatagtataaatgctcaaaatattatttcaaaaattaaaccagcgacaacagttaaagcaacagcattacaacaaattcaaaatatcgctacaaataaaattaatttaattaaagcaaataacgaagcgacagatgaagaacaaaatattgcaatagcacaagttgaaaaagagttaattaaagctaaacaacaaattgctagtgcagtgactaatgcagatgtggcatatttattgcatgatgagaaaaacgaaattcgtgaaatcgaacctgttattaacagaaaggcgtctgctcgagaacaattgacaacattattcaacgataaaaaacaagcaattgaagcgaatattcaagcaacggtagaagaaagaaatagtatattagcacagttacaaaatatttatgacactgctattggacaaattgatcaagatcgtagcaatgcacaagttgataaaacagcatcattaaatctacaaacaatacatgatttagatgtacatcctattaaaaagccagatgctgaaaaaacgattaatgatgatcttgcacgcgtcactgctttagtgcaaaattatcgaaaagtaagtaatcgtaataaggctgatgcattaaaagctataactgctttaaaattacaaatggatgaagaattaaaaacagcacgcactaatgctgatgttgatgcagttttaaaacgatttaatgttgcattaagcgatatagaagcagtaattactgaaaaagaaaatagcttactgcgaattgataacattgctcaacaaacatatgcgaaattcaaagcgatcgcaacaccagaacaattagctaaagtaaaagtattaattgatcaatatgttgcagatggcaatagaatgattgatgaagatgcgacattaaatgacatcaaacaacacacgcaattcattgttgatgaaattttagcaattaaattaccagctgaagcgacgaaagtatcaccaaaagaaattcagccagctccaaaagtttgtacgcctattaaaaaagaagagacacatgaatcgcgcaaagttgaaaaagaacttccaaatacaggttctgaaggaatggatttaccattgaaagaatttgcactgattacaggtgcggctttgttagctagaagacgtactaaaaacgaaaaagaatca

SEQ ID NO: 309 - DNA, 444 bp, Staphylococcus aureus
atgagtgttgaaatagaatcaattgaacatgaactagaagaatcaattgcatcattgcgacaagcaggcgtaagaattacacctcaaagacaagcaatattacgttatttaatttcttcacatactcatccaacagctgatgaaatttatcaagcactttcacctgattttccaaatataagtgttgcgacaatatataataacttaagagtgtttaaagatattggaattgtaaaagaattaacatatggagactcatcaagtcgattcgactttaatacacataatcattatcatattatatgtgaacaatgtggtaagattgttgattttcaatatccacagttaaatgaaattgaaagattagctcagcatatgactgactttgacgtaacacatcatcgaatggaaatttatggagtttgtaaagaatgccaagataaa

SEQ ID NO: 310 - DNA, 1182 bp, Staphylococcus aureus
atgagtgaaaaacaacaaattctcgattatatagaaacaaataaatatagttatatcgaaatcagtcatagaattcatgaacgtcctgaacttggtaatgaagaaatatttgcgtctcgaactttaatagatcgtttgaaagagcatgattttgaaattgaaaccgagattgctgggcatgcaactgggtttatagcgacatatgattcaggacttgacgggccagctataggttttttagcagaatacgatgctttgccaggattgggtcatgcttgtggtcataatatcattggaactgcaagtgttcttggtgcaattggtttgaagcaagtgattgaccaaattggtggtaaagtagtcgttcttggatgtccagctgaagaaggtggggaaaatggtagcgctaaagcttcttatgtcaaggctggtgtgattgatcaaatagacattgccttaatgattcatccgggaaatgaaacttataaaacgattgatactttggcagtggatgttttagatgttaaattttacggaaaaagtgctcatgcctctgaaaatgcagatgaagcgttaaatgcattagacgctatgattagttattttaatggtgtagcacaactacgacaacatattaaaaaagatcaacgtgtgcatggtgtgattttagatggcgggaaagcagctaatattattccagactatacacatgctcgtttttatactagagcaatgacgcgtaaagaattggatatattaacagaaaaagtaaatcaaatcgcacgtggagctgcgatacagactggttgtgattatgaatttggtcgaattcaaaacggtgtgaatgaattcattaaaacgccgaaattagatgatttatttgctaaatatgctgaagaagttggtgaagcagttattgatgatgattttggttatggctctacggatacagggaacgtaagtcatgttgtgccaacaatacatcctcatattaaaataggatcacgtaatttagtaggacatacgcatagatttagagaagcggctgcgagtgtacatggtgatgaagcattaattaaaggcgctaaaataatggcgttgatggggttagagttaattacaaatcaagacgtttatcaagacattattgaagagcatgcgcatttgaaagggaatgggaag

SEQ ID NO: 311 - DNA, 1929 bp, Staphylococcus aureus
atgactacgaccttcattattagctacattattttagcgctcattattgttggggttatcaatttatttttaataagatcaagaaaaaaaggcaaacgccaacaaaaggaacaacaatttacgacacgtcaatcaaatcaatctaaatttaaagctagtgatttagacaaaacaactgatcaatcgacacaacgtatgacgcatgaagagttgcgtgttgacaatcaagatgatcatagccaagttagtctaaatggttacacaaaggggtctgagaaagatcaagaagcattcactaataataaggatgaggaagcagttgctgctaaaaatcctgaatcagaagaatataaagtgaatgaaaaaataaaaaaagaacataaaaactttatttttggtgaaggtgtttcacgcggtaaaatattagcggcattattattcggtatgtttattgcgattttaaaccaaacattattaaatgttgctttaccaaaaattaatacggaatttaatatttctgcgtcaacagggcaatggttgatgacgggattcatgttagtaaacggtattttaataccaattacggcgtatctatttaataaatattcatatcgaaaattatttttagttgcgttagtactctttacaattggttcattaatctgtgcgatttcaatgaatttcccaatcatgatggttggacgtgtattacaagccattggtgcaggtgtactaatgccattaggttcaattgttattattacaatttatccacctgaaaaacgtggtgctgccatgggtacaatgggtatcgcaatgattttagcacctgcaattggtccaacattatcaggttatattgtacaaaattaccattggaatgtgatgttttacggtatgttcattatcgggattatcgctattttaattggttttgtatggtttaagttatatcaatatacaacaaaccctaaagctgatatcccaggtatcatttttagtacgattggttttggtgctttgttatatggtttctcagaagctggcaacaaaggttggggttcagtagagatagaaacaatgtttgcgattggtattatctttattattctattcgttattagagaattaagaatgaaatcaccaatgttgaatttagaagtattgaaattcccaacatttacattaacaacaattattaatatggttgtaatgttaagtttatatggtggtatgattttattaccgatttatttacaaaatttacgcggattctcagcattagattccggattgttattattacctggttctctaattatgggtctactaggaccatttgcaggtaaattgttagatactattggtttaaaaccattagctatctttggtattgctgtaatgacttatgcaacatgggaattaactaaattaaatatggatacaccatatatgacaatcatgggtatctatgtacttcgttcatttggtatggcatttataatgatgccaatggtaactgcagctattaatgcgttaccgggacgacttgcctctcatggtaatgctttcttaaatacgatgcgtcaattagcaggctctataggtacagcaatcttagttactgtaatgacaacacaaactacacaacacttatcagcttttggggaagagttagataaaacgaatcctgttgtacaagatcatatgcgtgaattagcatcacaatatggcggacaagaaggcgcaatgaaagtgttactacaatttgtaaataaactagcaacggttgaaggtattaatgatgcatttatagttgcaacgatatttagcatcatcgccttaattttatgtttatttttacaaagtaataaaaaagcaaaagctacagctcaaaagttagatgcagataatagtatcaatcatgaa

SEQ ID NO: 312 - DNA, 927 bp, Staphylococcus aureus
atgattaaaaataaaatattaacagcaactttagcagttggtttaatagcccctttagccaatccatttatagaaatttctaaagcagaaaataagatagaagatatcggccaaggtgcagaaatcatcaaaagaacacaagacattactagcaaacgattagctataactcaaaacattcaatttgattttgtaaaagataaaaaatataacaaagatgccctagttgttaagatgcaaggcttcattagctctagaacaacatattcagacttaaaaaaatatccatatattaaaagaatgatatggccatttcaatataatatcagtttgaaaacgaaagactctaatgttgatttaattaattatcttcctaaaaataaaattgattcagcagatgttagtcagaaattaggctataatatcggcggaaacttccaatcagcgccatcaatcggaggcagtggctcattcaactactctaaaacaattagttataatcaaaaaaactatgttactgaagtagaaagtcagaactctaaaggtgttaaatggggagtgaaagcaaattcattcgttacaccgaatggtcaagtatctgcatatgatcaatacttatttgcacaagacccaactggtccagcagcacgagactatttcgtcccagataatcaactacctcctttaattcaaagtggctttaatccatcatttattacaacattgtcacacgaaagaggtaaaggtgataaaagcgagtttgaaatcacttacggcagaaacatggatgctacatatgcttacgtgacaagacatcgtttagccgttgatagaaaacatgatgcttttaaaaaccgaaacgttacagttaaatatgaagtgaactggaaaacacatgaagtaaaaattaaaagcatcacacctaag

SEQ ID NO: 313 - DNA, 1209 bp, Staphylococcus aureus
atgcaatcaacgaaaaccaaaacgaagcatttttcatttttattgctaattacgttaggcgtcatgaccgcttttggcccactaactatagatatgtacgtaccatcattacctaaagtgcaaggtgattttggttctactacatcagaaattcaattaacattatcattcacaatgattggtcttgcactaggccaatttatctttggacctttatccgatgcttttggtcgcaaacggattgctgtatccattttgatcattttcattttggtatcaggtttgtctatgtttgttgatcaattgccattattcttaactttacgatttattcaaggtttaactggtggtggcgtcatcgtgattgcaaaagcctctgctggtgataaatttagtggcaacgcactcgctaaatttttagcatctttaatggtagttaatggcatcatcactattcttgcaccattagccggtggattagctttatccgtagcaacatggcgttctattttcacaattttaactattgtggcactcatcattttaattggcgtcgcttctcaattacctaaaacatctaaagatgaattaaagcaggtgaattttagtagcgtcattaaagattttggaagtcttttgaaaaaaccagcatttattattccaatgctattacaaggtttaacttatgtaatgctatttagttattcatctgcatcgccatttattactcaaaaattgtataatatgacaccccaacaatttagtatcatgtttgctgttaacggtgtaggtttaatcattgtcagtcaagtcgttgctttattagtagaaaaattacatcgccacatattattaatcattttaactattatacaagtggtaggtgttgctttaattatcctgacacttacattccatttaccactttgggtcttactcatcgcattcttcttaaatgtgtgtcctgtgacgtcaattggaccgcttggtttcacaatggctatggaagaacgaacaggtggcagtggtaacgcatcaagtttacttggcttattccaatttatcttaggtggcgctgttgcaccattagttggcttaaaaggcgaatttaatacatcaccatatatgattattatcttcattacagccattctattagtcagtctacaaatcatttactttaaaatgattaaaaagcaacatgtcgca

SEQ ID NO: 314 - DNA, 678 bp, Staphylococcus aureus
atgatgtatggatatccagagaaatggttggaaggtatgacaactggagaaggtatcgcggcagaattacgcttaggcattgtgaatggtcacatagctgaaggtacgttactcactgaaaatcaaatggcaaagcaatttaatgtgagtcgttcgccaattcgagatgcatttaaattattgcaacaaaatcaactcatccaattagaaagaatgggtgcacatgtgttgccgtttggggaacaagaaaagaaagaaatgtatgatttgcgactgatgttagagtcatttgcattttcaagagttaaaaatcaagagcgactacctatcgtaaaagaaatgaagaaacaacttgaaatgatgaaagtggcagtaaaatttgaggatgcagaatcatttacgaagcatgactttgaatttcatgaaacattaatcaaagcatctaatcatcaatatttaaactcattttggagtcatttaaaaccagtaatgatggcactcgttttaacatccatgcgacaacgtatgcaacagaacccgcaagattttgaacgcatacatcataatcatcaagtgtttattgatgcagtggaacaatacgacagtcaaattttgaaagaagcgtttcatttaaatttcgacgatgttggtaaagatattgaaggattttggttgaat

SEQ ID NO: 315 - DNA, 1446 bp, Staphylococcus aureus
atgggaagttttttcaataaaatagcacgaaaagaggatccggctatctatcaaaataaagatggtcatttaaagcgtacacttcgggtgcgtgatttcttagctttaggtgtaggaacaattgtatcgacatctatctttacgctacctggcattgttgctgcagaacatgcaggaccggccgttgcgttatcattcttactcgctgctattgttgctggtttagttgcatttacttatgcagaaatggctgccgctatgccatttgcaggttcagcctattcttgggtcaatgtattatttggtgaattttttggatgggttgccggttgggctctattagctgaatattttatcgccgtagcctttgttgcatcaggattctcagcgaatttacgcggacttgtgaaaccaattggcatcgaattacctgcagcattatcaaatccatttggtacaaatggcggttttatcgatattattgctgctatcgttattttattaactgcattattactatcacgtggtatgtcggaagcagctcgtatggaaaatattttagttattttaaaagtattagctattattttatttgtcatcgtaggtttaacagcaataaatgttagtaactatgtgccatttattccagaacacaaagtaactgctacaggtgactttggtggatggcaaggcatatatgctggtgtttcaatgattttcttagcgtatatcggtttcgattctatcgcagcaaactcagcagaagcacttgatcctcaaaagacaatgcctagaggtattcttggttctttaagcgttgctatcgtattatttattgctgtagcacttgtgttagttggtatgttccattactcacaatacgcaaacaatgctgaacctgttggttgggctttacgtcaaagtggtcatggtgttgtagcagctattgttcaagctatctctgttatcggtatgtttacagcattaattggtatgatgttagcaggctcacgtttactttattcatttggacgtgacggcttattaccttcatggttaagccacttaaacgacaaacatttacctaatcgcgcactagttatacttactattattggtgttttaattggttctatgttcccattcgcatttttagcacaattaatttcagcaggtacacttgttgcatttatgttcgtttcattagcaatgtatcgtttgagaaagcgtgaaggtaaagatctaccaattcctgcatttaaattacctttatatcctgtgttaccagcaattacatttgttttagtattgctagtattctggggattaggattcgaagcgaaattatacactttaatttggtttattgttggtatcatcctatatttaagttatggacttagacattctaagaaaaatgacgtagctgaataccacccaccaaaa

SEQ ID NO: 316 - DNA, 1368 bp, Staphylococcus aureus
atgaatagtgataatatgtggttaacagtaatggggctcattattattatttcaattgtaggtttactcattgccaaaaagataaatccagttgtaggtatgacaatcataccttgcttaggggcaatgattttaggatatagtgtgacagatttggttggattttttgctaaagggttagatcaagtcatcaacgttgttattatgtttatctttgccattattttctttggcatcatgaacgatagtggtttattcaagccgcttgtcaaacgcttaatattaatgacacgaggcaatgtcgtcattgtctgtgcaatgacagctttaattggcacaatagcccaattagatggggccggtgcggtaacatttttgctttctattcctgcattattacctttatataaagcgttaaatatgaataaatatttattgattttactattagcattaagcgcggcgattatgaacatggtaccttggggaggtccaatggctcgtgtagctgcagtgttaaaagccaaaagtgtcaatgaattatggtatggattaatacctattcaaataataggtttcattcttgttatgttgtttgcggtatatcttggatttaaagaacagaaacgtatcaaaaaagcaatagagagaaatgaattaccgcaaacacaagatatagatgtacataaattagttgaagtatatgaacgagatcaagatgtaaggtttcctgtaaaaggacgtgcaagaacaaaatcatggataaaatgggtgaatacagctttaactttagctgttattctatcgatgttaataaatattgcgccacctgaatttgcattcatgataggtgtttcgttggcacttgttattaattttaaatcagtggatgaacaaatggaacgattaagagcgcatgcgccgaatgcattaatgatggctgcagtgattattgcagcaggtatgtttttaggtgtactaaatgaaaccggtatgcttaaagcgattgcgaccaatttaatcaaagtgattcctgcagaagtaggaccatacttgcatattattgtaggtttacttggcgtaccattagatttactaactagcacagacgcttattattttgctgtgttaccgattgtcgaacaaacagcagggcaatttggtgtaccgtctgtatcaacagcttattcaatggtcatagggaatattataggtacatttgtcagcccattttcaccagccttatggttggcaattggtttagcagaggcaaacatgggcacgtatattaagtatgcattcttttggatttggggattcgctatcgttatgttagtaattgcaatgttgatgggcattgtgacgatt

SEQ ID NO: 317 - DNA, 1416 bp, Staphylococcus aureus
atggaaaacacggttaaatatcgtaagtttatactccctatcgttgtaggtctccttatttgggcacttacaccttttaaaccggatgctgtggatccaacagcatggtatatgttcgcaatattcgtcgcgacaatcattgcttgtattacacaaccgatgccaattggggccgtctctataattggatttacaatcatggtactcgttggcattgttgacatgaaaacggctgtcgctggttttggtaataatagcatttggttaattgctatggcatttttcatttcgagaggatttgtgaaaacaggtcttggtagacgtatcgcacttcatttcgtcaaattatttggtaaaaaaacattaggattagcatattctatcgtcggtgtagatttaattctagcgcctgctacaccaagtaataccgcgcgtgctggtggaatcatgttcccaattatcaaatcactttctgaatcatttggttcgaaaccgaaagacggatcagcacgcaaaatgggtgcatttcttgttttcacagaattccaaggtaatttaattactgcggctatgtttttaactgcaatggccggtaacccccttgcacaaaatttagcatctagcacatctaatgttcacattacatggatgaattggtttctagctgctttagttcctggacttgtttccttaattgttgtaccttttattatttataaaatttatccaccaactgttaaagaaacaccaaatgctaagagttgggctgaaaatgaattagcgactatgggtaaaatcgctttagctgaaaaatttatgattggtatttttgtcgttgcgttaacactatggattgtcggaagtttcattcatattgatgcaactttaacggcctttattgcgctagcattgttattattgacaggcgtcttaacatggcaagacattttaaacgaaacaggtgcttggaacacattagtatggttctcagtattagtgttaatggccgaccaattaaacaagcttggatttattccttggttaagtaaatccattgctacaagtcttggtggcttaagctggcctatagtcctggtcattttaatattgttctacttctattcacattacttatttgcaagttctacagcacatatcagtgcgatgtatgcagcattactaggcgttgccatcgcagccggtgcaccaccattattcagtgcattaatgttaggtttcttcggtaacctattagcttcaacaacacactatagtagtggtccagcgccgattctattctcttcaggttacgtgactcaaaaacgttggtggacaatgaacttaatattaggtttcgtctactttattatctggattggtttaggatcactttggatgaaagtaattggtatattt

SEQ ID NO: 318 - DNA, 990 bp, Staphylococcus aureus
atgaataaagtaattaaaatgcttgttgttacgcttgctttcctacttgttttagcaggatgtagtgggaattcaaataaacaatcatctgataacaaagataaggaaacaacttcaattaaacatgcaatgggtacaactgaaattaaagggaaaccaaagcgtgttgttacgctatatcaaggtgccactgacgtcgctgtatctttaggtgttaaacctgtaggtgctgtagaatcatggacacaaaaaccgaaattcgaatacataaaaaatgatttaaaagatactaagattgtaggtcaagaacctgcacctaacttagaggaaatctctaaattaaaaccggacttaattgtcgcgtcaaaagttagaaatgaaaaagtttacgatcaattatctaaaatcgcaccaacagtttctactgatacagttttcaaattcaaagatacaactaagttaatggggaaagctttagggaaagaaaaagaagctgaagatttacttaaaaagtacgatgataaagtagctgcattccaaaaagatgcaaaagcaaagtataaagatgcatggccattgaaagcttcagttgttaacttccgtgctgatcatacaagaatttatgctggtggatatgctggtgaaatcttaaatgatttaggattcaaacgtaataaagacttacaaaaacaagttgataatggtaaagatattatccaacttacatctaaagaaagcattccattaatgaacgctgatcatatttttgtagtaaaatcagatccaaatgcgaaagatgctgcattagttaaaaagactgaaagcgaatggacttcaagtaaagagtggaaaaatttagacgcagttaaaaacaaccaagtatctgatgatttagatgaaatcacttggaacttagctggcggatataaatcttcattaaaacttattgacgatttatatgaaaagttaaatattgaaaaacaatcaaaa

SEQ ID NO: 319 - DNA, 1254 bp, Staphylococcus aureus
atgattaatcagtctatatggcgcagtaactttcgcattttatggctcagtcagtttatagcgattgctggactgacagtacttgtgccattattgccaatttatatggcatcactacaaaatctatcagtcgtagaaatacagttgtggagtggtatagcgattgctgctccagctgtaacgacgatgatagcttcgccgatatgggggaagctaggtgataagatcagccgaaaatggatggtgttaagagcgttacttggtttggcggtatgcttatttttaatggcattgtgtacgacaccattacagtttgtacttgtgaggttattgcagggactatttggtggtgttgttgatgcatcaagtgcgtttgcgagtgcagaggcgccagctgaagatcgtggaaaggtattaggaagactgcaaagttcagtcagcgcagggtctcttgtggggccattaattggcggtgttacagcttcgatattaggttttagtgcgttactgatgagtattgccgttattacttttattgtctgtattttcggtgcattaaaattgattgaaacgacacatatgccaaaatcacaaacaccaaatattaataaaggtattcgccgttcatttcaatgtctattatgcacacaacaaacatgtcgatttattatcgttggcgttttagcaaactttgctatgtatggcatgctaactgcattatcaccacttgcttcatcagtgaatcatacagcgatagatgaccgtagtgtgattggatttttacagtccgcattttggacggcttcgatattaagcgcgcctttatggggacgctttaatgataaatcatatgttaaatcagtatatatatttgccacgattgcatgtggttgtagtgcgatactgcaaggtttagcgacgaatatagagtttttaatggctgcaagaatacttcaaggattaacatatagtgcattgattcaaagtgtcatgtttgttgtcgtgaatgcgtgtcatcaacaacttaaaggcacatttgttggaacgacgaacagtatgttagttgttggtcaaattattggcagtcttagtggcgctgccattacaagttatactacaccagctactacgtttatcgttatgggcgtagtatttgcagtaagtagtttatttttaatttgttcaaccatcactaatcaaatcaacgatcacacattaatgaaattatgggagttgaaacaaaaaagtgcaaaa

SEQ ID NO: 320 - DNA, 555 bp, Staphylococcus aureus
atgaagcgattattcgatgtagtgagttcaatatatggtttagtagttttaagtccgattctgttaattacagcattactaattaaaatggaatcacctggaccagccattttcaaacaaaaaagaccgacgattaataatgaattgtttaatatttataagtttagatcaatgaaaatagacacacctaatgttgcaactgatttaatggattcaacatcgtatataacaaagacagggaaggtcattcgtaagacctctattgatgaattgccacaattattgaatgttttaaaaggagaaatgtcaattgtaggtcctagaccagcgctttataatcaatacgaattaatcgaaaaacgtacaaaagcgaacgtgcatacgattagaccaggtgtgacaggactagctcaagtgatggggagagatgatatcactgatgatcaaaaagtagcgtatgatcattattacttaacacatcaatctatgatgcttgatatgtatatcatatataaaacaattaaaaatatcgttacttcagaaggtgtgcatcac

SEQ ID NO: 321 - DNA, 1161 bp, Staphylococcus aureus
atggcacaacttaattcaaagatagcttccttaaaattattcgcaagttacgccatagcaacttatattttagttatattaacgagtgcattaaatctttttaaaggttatgtggccgatacgttctatattgctgaaacattgctaatcgttttaaccatcattttaattattattttaacaacggaacaaacatggaagcatcatgacctatggcgacgtatcgtcgaagtgttgttattgttgatgacattaacaggcaacgtatttacattattaatgtttgtaagtattagacgttaccaacgtacatcgcaaatacatagttataacgggtgggaatcgtttatacgaaaaactactagacatcgtattgcgattatcgggttacttattttagtctacatgctgacattatcaattgtgtcacaatttacatttgatacgacattggctactaaaaatcagttcaatgcactgttacatggaccgagtctagcctatccgtttggtactgatgatttcggtagagacttatttacacgcgtagttgtaggaacgaagctgacattttcaatttcaattatttcagtagttattgcagttatttttggtgtgttactaggcactatcgcaggttattttaatcatattgataatttaataatgcgaattttagatgtagtgtttgcaattccatcattattgttagcggtggcaattattgcatcatttggagcaagtattccaaatttaattattgctttaagtatcggtaatataccatcatttgcacggacaatgcgtgccagtgttttagaaattaaacgcatggaatatgtagatgcagcacgtatcactggtgaaaacacttggaatatcatatggcgttatattttaccgaatgcgattgcgcctatgattgtacgtttttcattaaatataggtgtggttgtattaacaacaagtagtttaagtttcctaggacttggtgttgcacctgatgtagctgaatggggcaacattttacgtaccggtagtaactacttggaaacgcacagtaatttagctattgtacctggtgtttgtattatgttcgtcgttttagcatttaattttataggtgatgcagtgcgtgatgcactagatccaagaattcat

SEQ ID NO: 322 - DNA, 1164 bp, Staphylococcus aureus
atgaaaacaatacatttgtttcgcatctaccactcttttttattgaaaaagtggtatttgattatctatttactatttatattagcggcactccttattacattaacgacaatccaacatgtaacagaagatgacaatcattttaatataggtgtcgtagataaagatcaatcaagtgaaacgaaattaatcttaaactctattggtaaagggagtaacctaggaaaaaacgtgagcattaaagcatatgatgataagcaagcacatactttgttaaaaaaacataaacttcaaggctattttgtttttgataaaggtatgaccaaggcattttataaacaaggcgaactaccaatttcagtatatacatatgatcaacaatccatgaaaagtgtcgtgctatctcagctaacagattctgtttaccaacgtcttatgcgatcaatgggtggcatcttagcttttcaagacttagcaccgaaagcatcacattctgacagtatcaatgttatgactgatttgctgattacaggattaaaccgttcaggtgcatttaacttagaaccgattcatttatacgatacgggcagttattatgcaattacaggatttttaacaacggtattcatctttgcactatctttatttacagttttgaaaatgaatcaagatactgtattgaaagcgcgattgaaaatgtttcatttttctaaagagcgtttattaatcattcgtacgttgattacatggttttatactatgttatggagtatcgttggtgtagtttggattgtgttcagtattccgaatatctttgaattatataattggccaacgttagccattcatttaagctattatgttacctttttaatactgtggttattactcatcgaacttttaacaacaggcttgttgaatagtattagtaaagtcatattagctattgtcatcctggtgttatctggtttaacaatacctacgatttttttacaacatatagcaaatggtgttttcaatattcaaccgttcgcagttgtaacaaatcaattgttagaaattattttaaacaactacattttagaactgcaccctagtttctatcttagcttcatcgcacttttgataattaatttagctgtattggtttggaggtatcgtcaa

SEQ ID NO: 323 - DNA, 1305 bp, Staphylococcus aureus
ttgaaaaaacaagttattatttcgggcctcatgttattttcactattttttggagccggaaatttaatattcccgcccatgcttggccatacagcgggtcaaaatatgtggattggtatgctaggctttgcccttacaggcatattactcccctttattactgttattgttgttgcattttatgatgaaggtgttgaaagtgtaggcaatcgtatacatccatggttcgggtttatttttgctgtcgtgatttacatgtctatcggagcattttacggtattccacgtgctgcaaatgtcgcgtacgaaattggtacaagacacattttacctgtgcataaccaatggactttaattatattcgcagcaatcttttttgccatcgtttactggattagtttaaatccatcgaaaatcgttgataatttaggtaaattattaacaccgttattactattaatggtcgctctattaagtattgctgtcattttcaaccctgaatctgcactaagtgcacctaaggataaatatataacacatcctttcatttcaggaagtttggaaggctattttacaatggatcttgttgctgcgttagctttttccgtagtcattgtcaatggctataagtttaaaggcctcacagatcgcatgaaaattttaaaatatgtctgcttttcaggtcttattgcagccatattacttggaatgatttactttgcacttgcatacgttggggcatcaacagctccaggaaactttaaagatggtacagatatattgacgtacaactcattacgattatttggttcgttcggtaacctcgtatttggaatgacggttatccttgcatgcctaacaacatgtataggactcgtcaatgcttgcgccacatttactaagaaacacgtacctaagttttcttataaaatattcgcacttattttctctatcatagggttcttatttacaacacttggtttagaaatgattttaaaaattgctgtcccattattgactttaatatatcccgtgtcgattgcacttgtactcatatcatttgctaacatgtttagcacattcagattcagttgggcctatcgactcgcaactgttattacattgattatttcaattttacaaatactaaatagtttcaacttattacacggtgttattttgaaatcgtttatgatgttacctttagcagatatcgatttagcttggcttgtaccattcatgctctttgctattatcggtttcataatcgatgtatttatacgccgtccgaaacaagcgacaact

SEQ ID NO: 324 - DNA, 1710 bp, Staphylococcus aureus
gtgaaacattatttgactaaatttgtagcaatgctaataactgctgctatggtgtgtagctttgggttactgaaaagtcaggcagcagaacaacaaagtattagtgatgtatatagtgtgataacggatgcgaaatctgcactttctaataattcgatatcgaatgacaataagcagaaagcaattgagcaagtggtaagtgcagttaagaaattatcgcttgaagataatagtgaaagtaatgctgtcaaatcagatgtgagaaagcttgaagatgcaaaagcgaatgataatcaaaaagatacactttcgcaattaacgaagtcattaattgcttatgaagagaaattggctagtaaagatgcgggttctaaaattaaactattgcaacagcaagtcgatgctaaagatgctgcgatgacaaaagcgattaaagataaaaataaagcggaattagaatctttgaacaatagtttgaatcagatttggacaagtaatgaaacagtgattcgcaattatgacgcaaatcaatatggacaaattgaagtcgcattattacaacttagaattgcaattcataagtcaccattagatacggcaaaagtgtcacatgcttggacaacttttaaatcaaatattgatcatgtcgataaaaaaagtaatacgtctgcaaatgatcaataccatgtatcacaattaaatgatgcgttagagaaggcgattaaagctatcgacgacaatcaattgtcggatgctgatgctgcgcttacacattttatagaaacttggccgtatgttgaaggtcaaattcaaactaaagacggtgctttgtatacgaaaattgaagataaaataccatattatcaaagtgtattagacgaacataataaagcacatgtgaaagatggtttagtagatttaaataaccaaattaaagaggttgttggccatagttatagcttcgtcgatgtgatgattatctttttacgtgaagggctagaagtgttgttaattgtaatgacattgactaccatgacgcgtaatgtaaaagataagaaagggactgcaagtgtgattggtggtgcaattgccggacttgtactgagtattatcttagcaattacgtttgtagaaactttagggaatagtggcattcttcgtgaaagtatggaagcgggattaggtatcgttgcggtcatattaatgtttatcgttggtgtttggatgcacaaacgttcaaatgcaaaacgttggaatgacatgattaaaaatatgtatgctaatgcgattagtaatggtaatttggtattgttagcgacgattggtttaatatctgtgttgcgtgaaggtgtcgaggttatcattttctatatggggatgataggtgagctagcgaccaaagattttattattggtattgctttagctatcgttattttaatcatctttgcattattatttagatttatagttaaattaatacctattttctatatatttagagtgttgtcgatctttatttttattatgggattcaaaatgcttggcgtaagtattcaaaagttacaattattaggtgcgatgccaagacatgttattgaaggattcccaacgattaactggttgggcttttatccaagttatgaaccattgatagcacaaggtgcttatattatggtagttgctatcttaatctttaaatttaaaaaa

SEQ ID NO: 325 - protein, 388 aa, Staphylococcus aureus
MNKQIFVLYFNIFLIFLGIGLVIPVLPVYLKDLGLTGSDLGLLVAAFALSQMIISPFGGTLADKLGKKLIICIGLILFSVSEFMFAVGHNFSVLMLSRVIGGMSAGMVMPGVTGLIADISPSHQKAKNFGYMSAIINSGFILGPGIGGFMAEVSHRMPFYFAGALGILAFIMSIVLIHDPKKSTTSGFQKLEPQLLTKINWKVFITPVILTLVLSFGLSAFETLYSLYTADKVNYSPKDISIAITGGGIFGALFQIYFFDKFMKYFSELTFIAWSLLYSVVVLILLVFANDYWSIMLISFVVFIGFDMIRPAITNYFSNIAGERQGFAGGLNSTFTSMGNFIGPLIAGALFDVHIEAPIYMAIGVSLAGVVIVLIEKQHRAKLKEQNM

SEQ ID NO: 326 - protein, 164 aa, Staphylococcus aureus
MLFYLFHFTISFISTVLFSIIFNAPKRLLVACGFVGAIAWTIYQLTVDLEFGKVGASFLGSLILGLMSHTMSRRYKRPVIIFIVPGIIPLVPGGAAYQATRFLVSNDYTSAVNTFLEVTLISGAIAFGILVSEILYYLYTRIKQLYGKIKGKTYKKSYNMNNRV

SEQ ID NO: 327 - protein, 438 aa, Staphylococcus aureus
MINAVVIAVILMIMLCLCRLNVVISLFISALVGGLISGMSIEKVINVFGKNIVDGAEVALSYALLGGFAALISYSGITDYLVGKIINAIHAENSRWSRVKVKVTIIIALLAMSIMSQNLIPVHIAFIPIVIPPLLSLFNDLKIDRRLIGLIIGFGLCFPYVLLPYGFGQIFQQIIQSGFAKANHPIEFNMIWKAMLIPSMGYIVGLLIGLYVYRKPREYETRKISDSDNVTELKPYILIVTIVAILATFLVQTFTDSMIFGALAGVLVFFISRAYNWYELDAKFVEGIKIMAYIGVVILTANGFAGVMNATGDIDELVKTLTSITGDNKLFSIIMMYVIGLIVTLGIGSSFATIPIIASLFIPFGASIGLDTMALIALIGTASALGDSGSPASDSTLGPTAGLNVDGQHDHIRDTCVPNFLFYNIPLMIFGTIAAMVL

SEQ ID NO: 328 - protein, 97 aa, Staphylococcus aureus
MNHNVIIVIALIIVVISMLAMLIRVVLGPSLADRVVALDAIGLQLMAVIALFSILLNIKYMIVVIMMIGILAFLGTAVFSKFMDKGKVIEHDQNHTD

SEQ ID NO: 329 - protein, 319 aa, Staphylococcus aureus
MNRNIVKLVVFMLILVVAVAGCGQKDTEEKTEMTTIKDELGTEKIKKNPKRVVVLEYSFADYLAALDMKPVGIADDGSTKNITKSVRDKIGAYESVGSRPQPNMEVISKLKPDLIIADVSRHKKIKSELSKIAPTIMLVSGTGDYNANIEAFKTVAKAVGKEKEGEKRLEKHDKILAEIRKKIEQSTLKSAFAFGISRAGMFINNEDTFMGQFLIKMGIQPEVTKDKTTHVGERKGGPYIYLNNEELANINPKVMILATDGKTDKNRTKFIDPAVWKSLKAVKDNKVYDVDRNKWLKSRGIIASESMAEDLEKIAEKAK

SEQ ID NO: 330 - protein, 339 aa, Staphylococcus aureus
MTGEQFTQIKRPVSRLTEKVLGWLCWVMLLVLTVITMFIALVSFSNNTSIANLENTLNNNAFIQQLLAGNGYNTTQFVIWLQNGIWAIIVYFIVCLLISFLALISMNIRILSGFLFLISAIVTIPLVLLIVTLIIPILFFIIAMMLFIRKDKVEMVAPQYYEEYNGPIYDYREPVYERPQPKDDYYDVPKYEKELDKSNTVYDQEQERDKYDQFPKRAVESEYNHDERTEEEPSVLSRQAKYKQKSTEELGIEDDGYYAEPEVDPKELKAQQKREKAEIKAKKKEKRKAYNQRMKERRKNQPSAVSQRRMNFEERRQIYNNDISEERNSSEVKDKKEQE

SEQ ID NO: 331 - protein, 518 aa, Staphylococcus aureus
MENTINESEKKKRFKLKMPGAFMILFILTVVAVIATWVIPAGAYSKLSYEPSSQELKIVNPHNQVKKVPGTQQELDKMGVKIKIEQFKSGAINKPVSIPNTYERLKQHPAGPEQITSSMVEGTIEAVDIMVFILVLGGLIGVVQASGSFESGLLALTKKTKGHEFMLIVFVSILMIIGGTLCGIEEEAVAFYPILVPIFIALGYDSIVSVGAIFLASSVGSTFSTINPFSVVIASNAAGTTFTDGLYWRIGACIVGAIFVISYLYWYCKKIKNDPKASYSYEDKDAFEQQWSVLKDDDSAHFTLRKKIILTLFVLPFPIMVWGVMTQGWWFPVMASAFLIFTIIIMFIAGTGKSGLGEKGTVDAFVNGASSLVGVSLIIGLARGINLVLNEGMISDTILHFSSSLVQHMSGPLFIIVLLFIFFCLGFIVPSSSGLAVLSMPIFAPLADTVGIPRFVIVTTYQFGQYAMLFLAPTGLVMATLQMLNMRYSHWFRFVWPVVAFVLIFGGGVLITQVLIYS

SEQ ID NO: 332 - protein, 416 aa, Staphylococcus aureus
MSFFKRLKDKFATNKENEEVKSLTEEQGQDKLEDTHSEGSTQDANDLAENAEVKKKPRKLSEADFDDDGLISIEDFEEIEAQKMGAKFKAGLEKSRQNFQEQLNNLIARYRKVDEDFFEALEEMLITADVGFNTVMTLTEELRMEAQRRNIQDTEDLREVIVEKIVEIYHQEDDNSEAMNLEDGRLNVILMVGVNGVGKTTTIGKLAYRYKMEGKKVMLAAGDTFRAGAIDQLKVWGERVGVDVISQSEGSDPAAVMYDAINAAKNKGVDILICDTAGRLQNKTNLMQELEKVKRVINRAVPDAPHEALLCLDATTGQNALSQARNFKEVTNVTGIVLTKLDGTAKGGIVLAIRNELHIPVKYVGLGEQLDDLQPFNPESYVYGLFADMIEQNEEITTVENDQIVTEEKDDNHGSK

SEQ ID NO: 333 - protein, 868 aa, Staphylococcus aureus
MLKKWLNSNVKQFFVITFISVILTLILFSTHIYDYIVNGTVFSGAGDGFRQMMPFQMYLYEHLRSFSSLYDASFGLGGDYMKGLSYYYSLSPLMWLNFLFIKIGETVGIFNPTTIHFWPTNQLIMAMIRAIITFVVTFYLFKILHFKRSANMIATILYGMSTVVIYFNFTWSFYGNLLYLLPLSILGLERYFQQRKIGIFIVAIALTLFSNFYFSYYQAIIIGCYYLYRLIFTYKYDIVSRTQKLICVISATVLSVLSSVFGLFTGISAFLENDRKQNPNVDIPFLTPLDYHYFFFSDGFYITISILTIVALLSFKLYRFYFYRLFAIVTWILFIGSLSQYFDSAFNGFSFPERRWVYILALSSSALCGLFIQHLSTLNMKYYLIRTIPVCIIAILYVLLSPTHPLALIVGIILLIVLAVILKFSLWRYKKLTVAILVLIVMIQQIVILDNNKNMAIKPYQQSLSTLKQHDYHSNYVNQLIKKINQNATGSFNRIDYMSDYALNSPFIYHYNGISLYSSIFNGDILKYYDKTLQINMPIDKNSTYRLLGNRQNLLSLWNVNDRIRVNHDDNLPYGFKIKSEHKDNKVRWIHSKNTIHYPSAHITNKVFSNKELKSPLDKEQAMLQGIVSNNIKDVNTHFKANKNLLSDSTIKLNSAAWQSPTKHLLQVKQNNGGLTVQLPKSVSNQFKDLYFEMDLELLSPDKAHDVKVNEYTQERNKLTYKYRRVVTPVTIRIKAPDRIRLSLPKGKYRVNLKGIYGEDYTTLKDASNSLEAVKVSKTKHGYTITKNKNSSGYIVLPTAYNQGMKATSGDQSLKVEQVNGVMTGIKAPKNITKIQLSYTPPYYYLLITITIFGIICSIIFTRWARQK

SEQ ID NO: 334 - protein, 792 aa, Staphylococcus aureus
MRQLAQAKKKSTAKKKTTSKKRTNSRKKKNDNPIRYVIAILVVVLMVLGVFQLGIIGRLIDSFFNYLFGYSRYLTYILVLLATGFITYSKRIPKTRRTAGSIVLQIALLFVSQLVFHFNSGIKAEREPVLSYVYQSYQHSHFPNFGGGVLGFYLLELSVPLISLFGVCIITILLLCSSVILLTNHQHREVAKVALENIKAWFGSFNEKMSERNQEKQLKREEKARLKEEQKARQNEQPQIKDVSDFTEVPQERDIPIYGHTENESKSQSQPSRKKRVFDAENSSNNIVNHHQADQQEQLTEQTHNSVESENTIEEAGEVTNVSYVVPPLTLLNQPAKQKATSKAEVQRKGQVLENTLKDFGVNAKVTQIKIGPAVTQYEIQPAQGVKVSKIVNLHNDIALALAAKDVRIEAPIPGRSAVGIEVPNEKISLVSLKEVLDEKFPSNNKLEVGLGRDISGDPITVPLNEMPHLLVAGSTGSGKSVCINGIITSILLNAKPHEVKLMLIDPKMVELNVYNGIPHLLIPVVTNPHKAAQALEKIVAEMERRYDLFQHSSTRNIKGYNELIRKQNQELDEKQPELPYIVVIVDELADLMMVAGKEVENAIQRITQMARAAGIHLIVATQRPSVDVITGIIKNNIPSRIAFAVSSQTDSRTIIGTGGAEKLLGKGDMLYVGNGDSSQTRIQGAFLSDQEVQDVVNYVVEQQQANYVKEMEPDAPVDKSEMKSEDALYDEAYLFVVEQQKASTSLLQRQFRIGYNRASRLMDDLERNQVIGPQKGSKPRQVLIDLNNDEV

SEQ ID NO: 335 - protein, 453 aa, Staphylococcus aureus
MAEKLQRELSNRHIQLIAIGGAIGTGLFLGAGQTIALTGPSILLTYIIIGFMLFMFMRGLGEIIIQNTEFKSFADVTNTYIGPFAGFVTGWTYWFCWIITGMAEVTAVAKYVSFWFPEIPNWISALFCVLLLMSFNLLSARLFGELEFWFSIIKIATIIGLIVVGFVMILFAFKTQFGHASFTNLYEHGIFAKGASGFFMSFQMALFSFVGIEMIGVTAGETKDPVKTIPKAINSVPIRILIFYVGALAVIMSIIPWQQVDPDNSPFVKLFALIGIPFAAGLINFVVLTAAASSCNSGIFSNSRMLFGLSSQQQAPPNFSKTNKYGVPHVAIFASSALLLVAALLNYIFPDATKVFTYVTTISTVLFLVVWGLIIIAYINYSRKNPDLHKNATYKLLGGKYMGYLIFVFFIFVFGLLFINVDTRRAIYFIPIWFILLAFMYLRYKRIAAKSNK

SEQ ID NO: 336 - protein, 2186 aa, Staphylococcus aureus
MNLLKKNKYSIRKYKVGIFSTLIGTVLLLSNPNGAQALTTDNNVQSDTNQATPVNSQDKDVANNRGLANSAQNTPNQSATTNQATNQALVNHNNGSIVNQATPTSVQSSTPSAQNNNHTDGNTTATETVSNANNNDVVSNNTALNVPTKTNENGSGGHLTLKEIQEDVRHSSNKPELVAIAEPASNRPKKRSRRAAPADPNATPADPAAAAVGNGGEPVAITAPYTPTTDPNANNAGQNAPNEVLSFDDNGIRPSTNRSVPTVNVVNNLPGFTLINGGKVGVFSHAMVRTSMFDSGDNKNYQAQGNVIALGRIHGTDTNDHGDFNGIEKALTVNPNSELIFEFNTMTTKNGQGATNVIIKNADTNDTIAEKTVEGGPTLRLFKVPDNVRNLKIQFVPKNDAITDARGIYQLKDGYKYYSFVDSIGLHSGSHVFVERRTMDPTATNNKEFTVTTSLKNNGNSGASLDTNDFVYQVQLPEGVEYVNNSLTKDFPSNNSGVDVNDMNVTYDAANRVITIKSTGGGTANSPARLMPDKILDLRYKLRVNNVPTPRTVTFNETLTYKTYTQDFINSAAESHTVSTNPYTIDIIMNKDALQAEVDRRIQQADYTFASLDIFNGLKRRAQTILDENRNNVPLNKRVSQAYIDSLTNQMQHTLIRSVDAENAVNKKVDQMEDLVNQNDELTDEEKQAAIQVIEEHKNEIIGNIGDQTTDDGVTRIKDQGIQTLSGDTATPVVKPNAKKAIRDKATKQREIINATPDVTEDEIQDALNQLATDETDAIDNVTNATTNADVETAKNNGINTIGAVVPQVTHKKAARDAINQATATKRQQINSNREATQEEKNAALNELTQATNHALEQINQATTNADVDNAKGDGLNAINPIAPVTVVKQAARDAVSHDAQQHIAEINANPDATQEERQAAIDKVNAAVTAANTNILNANTNADVEQVKTNAIQGIQAITPATKVKTDAKNAIDKSAETQHNTIFNNNDATLEEQQAAQQLLDQAVATAKQNINAADTNQEVAQAKDQGTQNIVVIQPATQVKTDTRNVVNDKAREAITNINATTGATREEKQEAINRVNTLKNRALTDIGVTSTTAMVNSIRDDAVNQIGAVQPHVTKKQTATGVLNDLATAKKQEINQNTNATTEEKQVALNQVDQELATAINNINQADTNAEVDQAQQLGTKAINAIQPNIVKKPAALAQINQHYNAKLAEINATPDATNDEKNAAINTLNQDRQQAIESIKQANTNAEVDQAATVAENNIDAVQVDVVKKQAARDKITAEVAKRIEAVKQTPNATDEEKQAAVNQINQLKDQAINQINQNQTNDQVDTTTNQAVNAIDNVEAEVVIKPKAIADIEKAVKEKQQQIDNSLDSTDNEKEVASQALAKEKEKALAAIDQAQTNSQVNQAATNGVSAIKIIQPETKVKPAAREKINQKANELRAKINQDKEATAEERQVALDKINEFVNQAMTDITNNRTNQQVDDTTSQALDSIALVTPDHIVRAAARDAVKQQYEAKKREIEQAEHATDEEKQVALNQLANNEKRALQNIDQAIANNDVKRVETNGIATLKGVQPHIVIKPEAQQAIKASAENQVESIKDTPHATVDELDEANQLISDTLKQAQQEIENTNQDAAVTDVRNQTIKAIEQIKPKVRRKRAALDSIEENNKNQLDAIRNTLDTTQDERDVAIDTLNKIVNTIKNDIAQNKTNAEVDRTETDGNDNIKVILPKVQVKPAARQSVGVKAEAQNALIDQSDLSTEEERLAAKHLVEQALNQAIDQINHADKTAQVNQDSINAQNIISKIKPATTVKATALQQIQNIATNKINLIKANNEATDEEQNIAIAQVEKELIKAKQQIASAVTNADVAYLLHDEKNEIREIEPVINRKASAREQLTTLFNDKKQAIEANIQATVEERNSILAQLQNIYDTAIGQIDQDRSNAQVDKTASLNLQTIHDLDVHPIKKPDAEKTINDDLARVTALVQNYRKVSNRNKADALKAITALKLQMDEELKTARTNADVDAVLKRFNVALSDIEAVITEKENSLLRIDNIAQQTYAKFKAIATPEQLAKVKVLIDQYVADGNRMIDEDATLNDIKQHTQFIVDEILAIKLPAEATKVSPKEIQPAPKVCTPIKKEETHESRKVEKELPNTGSEGMDLPLKEFALITGAALLARRRTKNEKES

SEQ ID NO: 337 - protein, 148 aa, Staphylococcus aureus
MSVEIESIEHELEESIASLRQAGVRITPQRQAILRYLISSHTHPTADEIYQALSPDFPNISVATIYNNLRVFKDIGIVKELTYGDSSSRFDFNTHNHYHIICEQCGKIVDFQYPQLNEIERLAQHMTDFDVTHHRMEIYGVCKECQDK

SEQ ID NO: 338 - protein, 394 aa, Staphylococcus aureus
MSEKQQILDYIETNKYSYIEISHRIHERPELGNEEIFASRTLIDRLKEHDFEIETEIAGHATGFIATYDSGLDGPAIGFLAEYDALPGLGHACGHNIIGTASVLGAIGLKQVIDQIGGKVVVLGCPAEEGGENGSAKASYVKAGVIDQIDIALMIHPGNETYKTIDTLAVDVLDVKFYGKSAHASENADEALNALDAMISYFNGVAQLRQHIKKDQRVHGVILDGGKAANIIPDYTHARFYTRAMTRKELDILTEKVNQIARGAAIQTGCDYEFGRIQNGVNEFIKTPKLDDLFAKYAEEVGEAVIDDDFGYGSTDTGNVSHVVPTIHPHIKIGSRNLVGHTHRFREAAASVHGDEALIKGAKIMALMGLELITNQDVYQDIIEEHAHLKGNGK

SEQ ID NO: 339 - protein, 643 aa, Staphylococcus aureus
MTTTFIISYIILALIIVGVINLFLIRSRKKGKRQQKEQQFTTRQSNQSKFKASDLDKTTDQSTQRMTHEELRVDNQDDHSQVSLNGYTKGSEKDQEAFTNNKDEEAVAAKNPESEEYKVNEKIKKEHKNFIFGEGVSRGKILAALLFGMFIAILNQTLLNVALPKINTEFNISASTGQWLMTGFMLVNGILIPITAYLFNKYSYRKLFLVALVLFTIGSLICAISMNFPIMMVGRVLQAIGAGVLMPLGSIVIITIYPPEKRGAAMGTMGIAMILAPAIGPTLSGYIVQNYHWNVMFYGMFIIGIIAILIGFVWFKLYQYTTNPKADIPGIIFSTIGFGALLYGFSEAGNKGWGSVEIETMFAIGIIFIILFVIRELRMKSPMLNLEVLKFPTFTLTTIINMVVMLSLYGGMILLPIYLQNLRGFSALDSGLLLLPGSLIMGLLGPFAGKLLDTIGLKPLAIFGIAVMTYATWELTKLNMDTPYMTIMGIYVLRSFGMAFIMMPMVTAAINALPGRLASHGNAFLNTMRQLAGSIGTAILVTVMTTQTTQHLSAFGEELDKTNPVVQDHMRELASQYGGQEGAMKVLLQFVNKLATVEGINDAFIVATIFSIIALILCLFLQSNKKAKATAQKLDADNSINHE

SEQ ID NO: 340 - protein, 309 aa, Staphylococcus aureus
MIKNKILTATLAVGLIAPLANPFIEISKAENKIEDIGQGAEIIKRTQDITSKRLAITQNIQFDFVKDKKYNKDALVVKMQGFISSRTTYSDLKKYPYIKRMIWPFQYNISLKTKDSNVDLINYLPKNKIDSADVSQKLGYNIGGNFQSAPSIGGSGSFNYSKTISYNQKNYVTEVESQNSKGVKWGVKANSFVTPNGQVSAYDQYLFAQDPTGPAARDYFVPDNQLPPLIQSGFNPSFITTLSHERGKGDKSEFEITYGRNMDATYAYVTRHRLAVDRKHDAFKNRNVTVKYEVNWKTHEVKIKSITPK

SEQ ID NO: 341 - protein, 403 aa, Staphylococcus aureus
MQSTKTKTKHFSFLLLITLGVMTAFGPLTIDMYVPSLPKVQGDFGSTTSEIQLTLSFTMIGLALGQFIFGPLSDAFGRKRIAVSILIIFILVSGLSMFVDQLPLFLTLRFIQGLTGGGVIVIAKASAGDKFSGNALAKFLASLMVVNGIITILAPLAGGLALSVATWRSIFTILTIVALIILIGVASQLPKTSKDELKQVNFSSVIKDFGSLLKKPAFIIPMLLQGLTYVMLFSYSSASPFITQKLYNMTPQQFSIMFAVNGVGLIIVSQVVALLVEKLHRHILLIILTIIQVVGVALIILTLTFHLPLWVLLIAFFLNVCPVTSIGPLGFTMAMEERTGGSGNASSLLGLFQFILGGAVAPLVGLKGEFNTSPYMIIIFITAILLVSLQIIYFKMIKKQHVA

SEQ ID NO: 342 - protein, 226 aa, Staphylococcus aureus
MMYGYPEKWLEGMTTGEGIAAELRLGIVNGHIAEGTLLTENQMAKQFNVSRSPIRDAFKLLQQNQLIQLERMGAHVLPFGEQEKKEMYDLRLMLESFAFSRVKNQERLPIVKEMKKQLEMMKVAVKFEDAESFTKHDFEFHETLIKASNHQYLNSFWSHLKPVMMALVLTSMRQRMQQNPQDFERIHHNHQVFIDAVEQYDSQILKEAFHLNFDDVGKDIEGFWLN

SEQ ID NO: 343 - protein, 482 aa, Staphylococcus aureus
MGSFFNKIARKEDPAIYQNKDGHLKRTLRVRDFLALGVGTIVSTSIFTLPGIVAAEHAGPAVALSFLLAAIVAGLVAFTYAEMAAAMPFAGSAYSWVNVLFGEFFGWVAGWALLAEYFIAVAFVASGFSANLRGLVKPIGIELPAALSNPFGTNGGFIDIIAAIVILLTALLLSRGMSEAARMENILVILKVLAIILFVIVGLTAINVSNYVPFIPEHKVTATGDFGGWQGIYAGVSMIFLAYIGFDSIAANSAEALDPQKTMPRGILGSLSVAIVLFIAVALVLVGMFHYSQYANNAEPVGWALRQSGHGVVAAIVQAISVIGMFTALIGMMLAGSRLLYSFGRDGLLPSWLSHLNDKHLPNRALVILTIIGVLIGSMFPFAFLAQLISAGTLVAFMFVSLAMYRLRKREGKDLPIPAFKLPLYPVLPAITFVLVLLVFWGLGFEAKLYTLIWFIVGIILYLSYGLRHSKKNDVAEYHPPK

SEQ ID NO: 344 - protein, 456 aa, Staphylococcus aureus
MNSDNMWLTVMGLIIIISIVGLLIAKKINPVVGMTIIPCLGAMILGYSVTDLVGFFAKGLDQVINVVIMFIFAIIFFGIMNDSGLFKPLVKRLILMTRGNVVIVCAMTALIGTIAQLDGAGAVTFLLSIPALLPLYKALNMNKYLLILLLALSAAIMNMVPWGGPMARVAAVLKAKSVNELWYGLIPIQIIGFILVMLFAVYLGFKEQKRIKKAIERNELPQTQDIDVHKLVEVYERDQDVRFPVKGRARTKSWIKWVNTALTLAVILSMLINIAPPEFAFMIGVSLALVINFKSVDEQMERLRAHAPNALMMAAVIIAAGMFLGVLNETGMLKAIATNLIKVIPAEVGPYLHIIVGLLGVPLDLLTSTDAYYFAVLPIVEQTAGQFGVPSVSTAYSMVIGNIIGTFVSPFSPALWLAIGLAEANMGTYIKYAFFWIWGFAIVMLVIAMLMGIVTI

SEQ ID NO: 345 - protein, 472 aa, Staphylococcus aureus
MENTVKYRKFILPIVVGLLIWALTPFKPDAVDPTAWYMFAIFVATIIACITQPMPIGAVSIIGFTIMVLVGIVDMKTAVAGFGNNSIWLIAMAFFISRGFVKTGLGRRIALHFVKLFGKKTLGLAYSIVGVDLILAPATPSNTARAGGIMFPIIKSLSESFGSKPKDGSARKMGAFLVFTEFQGNLITAAMFLTAMAGNPLAQNLASSTSNVHITWMNWFLAALVPGLVSLIVVPFIIYKIYPPTVKETPNAKSWAENELATMGKIALAEKFMIGIFVVALTLWIVGSFIHIDATLTAFIALALLLLTGVLTWQDILNETGAWNTLVWFSVLVLMADQLNKLGFIPWLSKSIATSLGGLSWPIVLVILILFYFYSHYLFASSTAHISAMYAALLGVAIAAGAPPLFSALMLGFFGNLLASTTHYSSGPAPILFSSGYVTQKRWWTMNLILGFVYFIIWIGLGSLWMKVIGIF

SEQ ID NO: 346 - protein, 330 aa, Staphylococcus aureus
MNKVIKMLVVTLAFLLVLAGCSGNSNKQSSDNKDKETTSIKHAMGTTEIKGKPKRVVTLYQGATDVAVSLGVKPVGAVESWTQKPKFEYIKNDLKDTKIVGQEPAPNLEEISKLKPDLIVASKVRNEKVYDQLSKIAPTVSTDTVFKFKDTTKLMGKALGKEKEAEDLLKKYDDKVAAFQKDAKAKYKDAWPLKASVVNFRADHTRIYAGGYAGEILNDLGFKRNKDLQKQVDNGKDIIQLTSKESIPLMNADHIFVVKSDPNAKDAALVKKTESEWTSSKEWKNLDAVKNNQVSDDLDEITWNLAGGYKSSLKLIDDLYEKLNIEKQSK

SEQ ID NO: 347 - protein, 418 aa, Staphylococcus aureus
MINQSIWRSNFRILWLSQFIAIAGLTVLVPLLPIYMASLQNLSVVEIQLWSGIAIAAPAVTTMIASPIWGKLGDKISRKWMVLRALLGLAVCLFLMALCTTPLQFVLVRLLQGLFGGVVDASSAFASAEAPAEDRGKVLGRLQSSVSAGSLVGPLIGGVTASILGFSALLMSIAVITFIVCIFGALKLIETTHMPKSQTPNINKGIRRSFQCLLCTQQTCRFIIVGVLANFAMYGMLTALSPLASSVNHTAIDDRSVIGFLQSAFWTASILSAPLWGRFNDKSYVKSVYIFATIACGCSAILQGLATNIEFLMAARILQGLTYSALIQSVMFVVVNACHQQLKGTFVGTTNSMLVVGQIIGSLSGAAITSYTTPATTFIVMGVVFAVSSLFLICSTITNQINDHTLMKLWELKQKSAK

SEQ ID NO: 348 - protein, 185 aa, Staphylococcus aureus
MKRLFDVVSSIYGLVVLSPILLITALLIKMESPGPAIFKQKRPTINNELFNIYKFRSMKIDTPNVATDLMDSTSYITKTGKVIRKTSIDELPQLLNVLKGEMSIVGPRPALYNQYELIEKRTKANVHTIRPGVTGLAQVMGRDDITDDQKVAYDHYYLTHQSMMLDMYIIYKTIKNIVTSEGVHH

SEQ ID NO: 349 - protein, 387 aa, Staphylococcus aureus
MAQLNSKIASLKLFASYAIATYILVILTSALNLFKGYVADTFYIAETLLIVLTIILIIILTTEQTWKHHDLWRRIVEVLLLLMTLTGNVFTLLMFVSIRRYQRTSQIHSYNGWESFIRKTTRHRIAIIGLLILVYMLTLSIVSQFTFDTTLATKNQFNALLHGPSLAYPFGTDDFGRDLFTRVVVGTKLTFSISIISVVIAVIFGVLLGTIAGYFNHIDNLIMRILDVVFAIPSLLLAVAIIASFGASIPNLIIALSIGNIPSFARTMRASVLEIKRMEYVDAARITGENTWNIIWRYILPNAIAPMIVRFSLNIGVVVLTTSSLSFLGLGVAPDVAEWGNILRTGSNYLETHSNLAIVPGVCIMFVVLAFNFIGDAVRDALDPRIH

SEQ ID NO: 350 - protein, 388 aa, Staphylococcus aureus
MKTIHLFRIYHSFLLKKWYLIIYLLFILAALLITLTTIQHVTEDDNHFNIGVVDKDQSSETKLILNSIGKGSNLGKNVSIKAYDDKQAHTLLKKHKLQGYFVFDKGMTKAFYKQGELPISVYTYDQQSMKSVVLSQLTDSVYQRLMRSMGGILAFQDLAPKASHSDSINVMTDLLITGLNRSGAFNLEPIHLYDTGSYYAITGFLTTVFIFALSLFTVLKMNQDTVLKARLKMFHFSKERLLIIRTLITWFYTMLWSIVGVVWIVFSIPNIFELYNWPTLAIHLSYYVTFLILWLLLIELLTTGLLNSISKVILAIVILVLSGLTIPTIFLQHIANGVFNIQPFAVVTNQLLEIILNNYILELHPSFYLSFIALLIINLAVLVWRYRQ

SEQ ID NO: 351 - protein, 435 aa, Staphylococcus aureus
MKKQVIISGLMLFSLFFGAGNLIFPPMLGHTAGQNMWIGMLGFALTGILLPFITVIVVAFYDEGVESVGNRIHPWFGFIFAVVIYMSIGAFYGIPRAANVAYEIGTRHILPVHNQWTLIIFAAIFFAIVYWISLNPSKIVDNLGKLLTPLLLLMVALLSIAVIFNPESALSAPKDKYITHPFISGSLEGYFTMDLVAALAFSVVIVNGYKFKGLTDRMKILKYVCFSGLIAAILLGMIYFALAYVGASTAPGNFKDGTDILTYNSLRLFGSFGNLVFGMTVILACLTTCIGLVNACATFTKKHVPKFSYKIFALIFSIIGFLFTTLGLEMILKIAVPLLTLIYPVSIALVLISFANMFSTFRFSWAYRLATVITLIISILQILNSFNLLHGVILKSFMMLPLADIDLAWLVPFMLFAIIGFIIDVFIRRPKQATT

SEQ ID NO: 352 - protein, 570 aa, Staphylococcus aureus
MKHYLTKFVAMLITAAMVCSFGLLKSQAAEQQSISDVYSVITDAKSALSNNSISNDNKQKAIEQVVSAVKKLSLEDNSESNAVKSDVRKLEDAKANDNQKDTLSQLTKSLIAYEEKLASKDAGSKIKLLQQQVDAKDAAMTKAIKDKNKAELESLNNSLNQIWTSNETVIRNYDANQYGQIEVALLQLRIAIHKSPLDTAKVSHAWTTFKSNIDHVDKKSNTSANDQYHVSQLNDALEKAIKAIDDNQLSDADAALTHFIETWPYVEGQIQTKDGALYTKIEDKIPYYQSVLDEHNKAHVKDGLVDLNNQIKEVVGHSYSFVDVMIIFLREGLEVLLIVMTLTTMTRNVKDKKGTASVIGGAIAGLVLSIILAITFVETLGNSGILRESMEAGLGIVAVILMFIVGVWMHKRSNAKRWNDMIKNMYANAISNGNLVLLATIGLISVLREGVEVIIFYMGMIGELATKDFIIGIALAIVILIIFALLFRFIVKLIPIFYIFRVLSIFIFIMGFKMLGVSIQKLQLLGAMPRHVIEGFPTINWLGFYPSYEPLIAQGAYIMVVAILIFKFKK

SEQ ID NO: 353 - DNA, 1521 bp, Staphylococcus epidermidis
atgaagaatttttctaaattcgcacttacaagtattgccgcattaactgtggcaagtcctttagtcaatacggaggttgacgctaaggataaagtatcagcaactcaaaacatcgatgcgaaagtaacccaagaatctcaagcaactaacgcattgaaagagttaccaaaatctgaaaatataaaaaagcattacaaagattataaggtcactgatactgaaaaagataacaaaggatttacgcattacacattgcaaccgaaagtgggcaacacgtatgcaccagacaaagaagtaaaagttcatacgaataaagagggtaaggtagttcttgtcaatggtgatactgatgctaagaaagttcaacctacgaataaggtagcgataagtaaagaaagtgccacagataaagctttcgaagcaataaaaattgaccgtcaaaaagctaaaaacttaaaaagtgatgtcatcaaaaccaataaagttgagattgatggagaaaaaaataaatatgtttataacatagaaattattacaacttcaccaaaaatctctcattggaatgtgaaaattgacgctgaaactggtcaagtggttgataaattaaatatgatcaaagaagcagctactacaggtacaggtaaaggtgtactaggtgacacgaaacaaattaatattaatagtgtcagcggtggttatacactacaagatttaactcaacaaggtacactttcagcttacaattacgatgcgaatactggtcaagcttacttaatgcaagataaagataaaaattttgttgatgatgaacaacgtgcaggtgtagatgcaaattattatgctaaagaaacgtatgactattataaaaatactttcggccgagaatcatatgataatcaaggtagcccaattatttcaatcgcacatgtaaataacttccaaggtcaagataacagaaacaatgcagcttggattggtgataaaatgatttacggtgacggtgatggacgtacatttacagcgttgtctggtgcgaatgatgttgttgcacatgaaattacacatggtgtaacacagcaaactgctaatcttgtttaccgttctcaatcaggtgcattaaatgaaagtttttcagatgtatttggttacttcattgatgatgaagatttcttaatgggtgaagatgtttacacacctggtgtaggcggagatgccttaagaagtatgtctaatccagagcgttttggacaaccatctcatatgaatgattttgtttatacaaattctgacaacggaggcgtacatacgaattcaggtattccgaacaaagcagcttacaacacaattcgtagtattggtaaacaacgttctgaacaaatttattatagagcgttaactgtttatttaacttcaaattctgatttccaagatgccaaagcatcattacaacaagcagcatttgatttatatggcgacggtattgctcaacaagtaggtcaagcatgggacagtgttggcgtg

SEQ ID NO: 354 - DNA, 384 bp, Staphylococcus epidermidis
atgtctaaacatagtgctacgttagttattatgtttttaataactttattgcctatttttcaatatcaagcttctgcacatgcgactttagaaaaatcaacaccacaacagcaaggggttattaaagacaaaccagaagcaatcaagttagagtttaatgaacctgtgaacaccaaatactcgagtgtgaccttatttgatgataaaggtaaaaagattaaagaccttaaaccaataacaactggatggtctcagacagttgtattttcatctgagcaaattgttaatggcacgaatactattgaatggcatacggtatctgcggatggacatgaagtcggagatacgtttgaattttcagttggaaaagtgaggctaaagatg

SEQ ID NO: 355 - DNA, 471 bp, Staphylococcus epidermidis
atgaaaaaaatcaaaacaatctcgacattggtagctggacttggtatagcatttctaggtcacacaacacatgcagatgcggctgaaaataacaatcaacaacaaagtacatataactatagtacaactgaagtatcattttctaattcaggaaatttatatacttctggccaatgtacttggtatgtttatgataaaactggtggaaaaatcggatcaacatgggggaatgcaaatagctgggcaactgcagctcaagcagcaggattcactgtaaataatacacctgaagaaggtgcaattatgcaatcatctgaaggtgctttcggacatgttgctttcgttgaaagtgtcaataatgatggttctattactgtatcagaaatgaactatgatggtggtccattcgctataagcacacgaacaatctctgccagtgaagcaagttcatataattacatccacctgaat

SEQ ID NO: 356 - DNA, 771 bp, Staphylococcus epidermidis
atgaaaaaaatcgctacagctacaattgcaactgcaggaatcgctactttcgcatttgcacaccatgacgcacaagcagcagaacaaaataatgatgggtacaatccaaacgacccttattcatatagctacacttacacaatcgatgctgaaggtaactaccactacacttggaaaggtaactggagtccagatcgtgtaaatacttcatataactataataattataataactacaactactatggttacaataactatagcaactacaataactacagtaattacaacaattacaacaactatcaatcaaacaacacgcaatcacaaagaacaactcaaccgactggtggtttaggcgcaagctattcaacatcaagtagtaatgttcacgttacaacaacttctgcgccatcatcaaacggtgtatctttatcaaacgctcgctcagcatctggtaacttatacacttcaggtcaatgtacatattatgtatttgacagagtaggtggcaaaatcggttcaacgtggggtaacgcaaacaactgggcaaacgctgcagcacgttctggttacacagtaaacaattcacctgctaaaggtgcaatcttacaaacgtcacaaggtgcatacggacacgtagcatacgttgaaggtgtaaacagcaatggttcaatcagagtttcagaaatgaactacggtcacggtgcaggtgttgtcacttcacgtacaatctctgcgagtcaagctgcttcatataactatattcac

SEQ ID NO: 357 - DNA, 1560 bp, Staphylococcus epidermidis
ttggaagataaaaaagctccagtaaatgaagactttttaaattacatcaaaaactatgccgatgtaagaaacatacctctttcaagacgtaagatggcctcgttgtttcacacttctaaaactgcaattgatgatgtctcacaagaaaaactaaatacttggttacgaaaacctgataagttttacgtgaatattatcgagctttcgaaagacttatattacaagtctggtgaatatcgtagcttacttaattactttattgatatggctcgtttctattatgtgattgatccattgtttagcagcgatagtaagatgagcaaggagaaagtcaaaaaagacctctctaaaatatctttacaacttaataaaatgaatttaaaacatgagttagctaaaatttacaaaacatgtgtacttgaagatattttctttggttatgaaatcgaagataaagacaattacttcatgttaaaacttgatccaaagtattgtaaattagttggtatctctgacgggatgtatacatatgctttcaacctgtcctattttgacggtaatttagatttattaaaaacattcccagaagagtttcaaagagcatatttagaacgctctattgataagcaagctgacttaaattggtttattccagacttcactaaatcagttgttttcaaaattaatgaagacgatcctactattttacctccattttctacaatgtttgaacccctattagatttaaacgattataaaaagcttaaaaaagctggagctaaaattaataactacatgttattacatcaaaaagtgccaatgcatgataatgcaaataaagattatcaagctgataacttcgcaatctcagctgaggcaatggactacttcagcgagttagttaacgaaaacttaccagatgaaattggttctatcgtttcccctatggaagttaaccctattaaattagatagagatgataaaactgataaggtacttgaagctactagagatgtttataacgcttctggtgtttcttcatttatctttaacaatgataaaaactctactggtggtttaacttactcagttcgtaaagatgagttattcgtaattaatttctaccgacaagttgagagatggttaaatcgtaaaatcagatatggcaatatcgtagccaaaaatcaatggagaatttctctattaaatgtaactggaatgagtgaagatacttacttagagcaattaactaagtctggtacattcggtttctcagttagaggacgtattgctgcattacatggtttagattaccatacattatctcaaagtttagaattagaaaacaatatcttagatttagatactaatttaatacctcttgctagttctcatactggtggtttaaatactgctgttgaacaaacaaaaggaaaaatagaagactctggtggcagacctactaaagaaactaaagacttgtctgatagcggacaagcaaatcgtgactctagtaattctgagacaaaatctttagaaggtggtgacactaataatgaa

SEQ ID NO: 358 - DNA, 1881 bp, Staphylococcus epidermidis
gtgggagtcgtgtcaatcattactgggattacaatatttgtcagtggtcagcatgctcaagctgctgaaatgacacaatcatcatcagattctaacgaacagtcacaacaaacagaacaagttgaacacaaagaagatacaactcatttatcttacgaattgaatcaagagggtgagacagcgagccaatcaaagactagtcaagagaatcaatctgatggcaatgtacaaaaaaagagtaatcaaatacaacaagattcaacacaaacgtcaccattaaatgaccaaaaacaaacttcaatggaacaacaatcaaaagacaatcatgttaccccaaattcacgtcaggatacatatccaaaaggccaaaatcaagatgataaaggcaaacaacagtttaaagataatcaacactcacaaacagaacatcaacctaatactcaaaaccaaaataatgatcaagattcatcagataaaaagcaacacccatctgatcaaactcaagactcatcttcaaaaggaacacaacctaaacaatcacagtctatagaagatagagataaaacagtaaaacaaccatcttctaaagtacacaaaataggtaacacaaaaactgataaaacagttaaaacaaatcaaaaaaagcaaacatcattaacttcaccacgcgttgtgaaatcaaaacaaactaaacatatcaatcaacttactgcgcaagctcaatataaaaatcaatatccagtcgtgtttgtacatggatttgtaggtttagtcggtgaagatgcattcagcatgtacccaaattattggggtggtactaaatataacgtgaaacaagaacttacaaaattaggttaccgagttcacgaagccaatgtaggggcatttagcagcaattatgaccgtgctgttgaactgtattattatattaaaggtggaagagtagattatggtgcagcacatgctgcaaaatatggtcacaagcgttatggcagaacatatgaaggcatcatgcctgattgggaaccaggtaaaaagatacatcttgttggacatagtatgggtggccaaacgatacgcttgatggaacattttttaagaaatggaaatcaagaagaaatagattatcaacgtcaatatggtggtacggtatccgatttatttaaaggtggacaagataatatggtgtctacgattactacattaggaacgcctcataatggcacacctgctgcagataaactagggtcgactaaatttattaaagatacaattaatagaattggaaaaattggtggaactaaagcgctcgatttagaactaggtttttctcaatggggcttcaaacagcaacctaatgaatcatatgctgaatatgcaaaacgtatagcgaatagtaaagtttgggagactgaagatcaggctgtaaatgatttaacaactgctggagcagaaaagttaaaccaaatgacgacattgaatcctaatatcgtctatacatcatatacaggtgctgcaacacatactggaccattaggcaatgaagtgccgaatattagacaattcccactattcgatttaacaagtcgtgtgataggtggagatgataataaaaatgtcagagtaaatgatggcatagtacctgtgtcttcttcactacatccaagtgatgaagcatttaagaaggtaggtatgatgaacctagcaactgacaagggtatctggcaagtgagacccgtacaatatgattgggatcatctagatttagtcggcttagatactactgattataagcgaactggagaagaattaggtcaattctatatgagtatgataaataatatgttgaaagtcgaagagttagatggtattacacgtaag

SEQ ID NO: 359 - protein, 507 aa, Staphylococcus epidermidis
MKNFSKFALTSIAALTVASPLVNTEVDAKDKVSATQNIDAKVTQESQATNALKELPKSENIKKHYKDYKVTDTEKDNKGFTHYTLQPKVGNTYAPDKEVKVHTNKEGKVVLVNGDTDAKKVQPTNKVAISKESATDKAFEAIKIDRQKAKNLKSDVIKTNKVEIDGEKNKYVYNIEIITTSPKISHWNVKIDAETGQVVDKLNMIKEAATTGTGKGVLGDTKQININSVSGGYTLQDLTQQGTLSAYNYDANTGQAYLMQDKDKNFVDDEQRAGVDANYYAKETYDYYKNTFGRESYDNQGSPIISIAHVNNFQGQDNRNNAAWIGDKMIYGDGDGRTFTALSGANDVVAHEITHGVTQQTANLVYRSQSGALNESFSDVFGYFIDDEDFLMGEDVYTPGVGGDALRSMSNPERFGQPSHMNDFVYTNSDNGGVHTNSGIPNKAAYNTIRSIGKQRSEQIYYRALTVYLTSNSDFQDAKASLQQAAFDLYGDGIAQQVGQAWDSVGV

SEQ ID NO: 360 - protein, 128 aa, Staphylococcus epidermidis
MSKHSATLVIMFLITLLPIFQYQASAHATLEKSTPQQQGVIKDKPEAIKLEFNEPVNTKYSSVTLFDDKGKKIKDLKPITTGWSQTVVFSSEQIVNGTNTIEWHTVSADGHEVGDTFEFSVGKVRLKM

SEQ ID NO: 361 - protein, 157 aa, Staphylococcus epidermidis
MKKIKTISTLVAGLGIAFLGHTTHADAAENNNQQQSTYNYSTTEVSFSNSGNLYTSGQCTWYVYDKTGGKIGSTWGNANSWATAAQAAGFTVNNTPEEGAIMQSSEGAFGHVAFVESVNNDGSITVSEMNYDGGPFAISTRTISASEASSYNYIHLN

SEQ ID NO: 362 - protein, 257 aa, Staphylococcus epidermidis
MKKIATATIATAGIATFAFAHHDAQAAEQNNDGYNPNDPYSYSYTYTIDAEGNYHYTWKGNWSPDRVNTSYNYNNYNNYNYYGYNNYSNYNNYSNYNNYNNYQSNNTQSQRTTQPTGGLGASYSTSSSNVHVTTTSAPSSNGVSLSNARSASGNLYTSGQCTYYVFDRVGGKIGSTWGNANNWANAAARSGYTVNNSPAKGAILQTSQGAYGHVAYVEGVNSNGSIRVSEMNYGHGAGVVTSRTISASQAASYNYIH

SEQ ID NO: 363 - protein, 520 aa, Staphylococcus epidermidis
LEDKKAPVNEDFLNYIKNYADVRNIPLSRRKMASLFHTSKTAIDDVSQEKLNTWLRKPDKFYVNIIELSKDLYYKSGEYRSLLNYFIDMARFYYVIDPLFSSDSKMSKEKVKKDLSKISLQLNKMNLKHELAKIYKTCVLEDIFFGYEIEDKDNYFMLKLDPKYCKLVGISDGMYTYAFNLSYFDGNLDLLKTFPEEFQRAYLERSIDKQADLNWFIPDFTKSVVFKINEDDPTILPPFSTMFEPLLDLNDYKKLKKAGAKINNYMLLHQKVPMHDNANKDYQADNFAISAEAMDYFSELVNENLPDEIGSIVSPMEVNPIKLDRDDKTDKVLEATRDVYNASGVSSFIFNNDKNSTGGLTYSVRKDELFVINFYRQVERWLNRKIRYGNIVAKNQWRISLLNVTGMSEDTYLEQLTKSGTFGFSVRGRIAALHGLDYHTLSQSLELENNILDLDTNLIPLASSHTGGLNTAVEQTKGKIEDSGGRPTKETKDLSDSGQANRDSSNSETKSLEGGDTNNE

SEQ ID NO: 364 - protein, 627 aa, Staphylococcus epidermidis
VGVVSIITGITIFVSGQHAQAAEMTQSSSDSNEQSQQTEQVEHKEDTTHLSYELNQEGETASQSKTSQENQSDGNVQKKSNQIQQDSTQTSPLNDQKQTSMEQQSKDNHVTPNSRQDTYPKGQNQDDKGKQQFKDNQHSQTEHQPNTQNQNNDQDSSDKKQHPSDQTQDSSSKGTQPKQSQSIEDRDKTVKQPSSKVHKIGNTKTDKTVKTNQKKQTSLTSPRVVKSKQTKHINQLTAQAQYKNQYPVVFVHGFVGLVGEDAFSMYPNYWGGTKYNVKQELTKLGYRVHEANVGAFSSNYDRAVELYYYIKGGRVDYGAAHAAKYGHKRYGRTYEGIMPDWEPGKKIHLVGHSMGGQTIRLMEHFLRNGNQEEIDYQRQYGGTVSDLFKGGQDNMVSTITTLGTPHNGTPAADKLGSTKFIKDTINRIGKIGGTKALDLELGFSQWGFKQQPNESYAEYAKRIANSKVWETEDQAVNDLTTAGAEKLNQMTTLNPNIVYTSYTGAATHTGPLGNEVPNIRQFPLFDLTSRVIGGDDNKNVRVNDGIVPVSSSLHPSDEAFKKVGMMNLATDKGIWQVRPVQYDWDHLDLVGLDTTDYKRTGEELGQFYMSMINNMLKVEELDGITRK

SEQ ID NO: 365 - DNA, 270 bp, Staphylococcus aureus
tcaataaggtgctttctaaagaatttttctccccatgtccaatctataaataaatctttggttaaaaattgcgacacaaccattctcattcgattatgcataaaaccagtttgtgtcaattccattattgctgcatcaatgattggaaatcctgtttgcccttcgcaccatgcattaaaatccgcttcattttgcgaccattttatctgtcgatatttaggtttgaaagcttggtatgaggtttcaggatactgtgtcattaacacataa

SEQ ID NO: 366 - DNA, 201 bp, Staphylococcus aureus
ctgttgcaccatttggtccttttgcacctaagtcaattgatacttgcccagttgccatatcaggaattaacattggtacgaaaaatggactcacacgtcttgggcctttatccattaattgtttatgtgcaatttcaaatgtttccataccaccgataccagaaccaatccatacaccgattcgatctgcagtattttcat

SEQ ID NO: 367 - DNA, 132 bp, Staphylococcus aureus
gatgcacctttaggtctaatacctggtgttacttttaaaaatgatgtacctaacttttcagtcaacatacgactttcaagaggtgaacaaacaacgccatctaaaccagctgcatttgctaacttggcataa

SEQ ID NO: 368 - DNA, 231 bp, Staphylococcus aureus
tacatcaaaccactatgtttacccattttcttaccatcaagtgttatcatatcacccggttgtgcaggtaaatattgtgataaaaatgttttaaagtttttttcgccgataaaacaaatgcctgtagaatcttttttcttagcagtaacaagtccttgttcttcagcaattcgacgcacttcactcttttcgatgtcgccaattgggaacatcacttttgaaagttgttgt

SEQ ID NO: 369 - DNA, 285 bp, Staphylococcus aureus
cgtttcgcatcttcatcatattctaataatggccaatctgtcacccataagaagtttaattttgtttcatcgattaaacctaattctttagctaatttgacacgtaatgcacctaaactttgtgcaacgacatttggtttgtctgcaacaaacattactaagtcaccagcttcagcaccagttaatgtaagtaatgtttcaacattttctgtttcaaagaaacgtccaattggacctgtcaaaccatcttccacaactttaacccacgctaatcctttagcacca

SEQ ID NO: 370 - DNA, 99 bp, Staphylococcus aureus
cgtcaacgtcctgtccatgtgtttccaaaaaataataatccacatgggcaatataatcatcaatatcaacatcactacgtaacgctagcaaatgctttt

SEQ ID NO: 371 - DNA, 123 bp, Staphylococcus aureus
atgaatgaagcatctaatttaatcttaaccatgccaaatgaatccaaagccgcaactaaaatagcaaagattaagccgccaatcactggtgctggtatacaaatacgttttaaaaaattaacg

SEQ ID NO: 372 - DNA, 213 bp, Staphylococcus aureus
attctatcagccgcattatccacaccggcattattaaacaacacatcgattcttccaaactgttcctttatgtcagacacaaagtctaccacttgttgttcgcttgcattatccacattatacgccttcgcattgtcaccattacttttaattttatcgacagtctccgataccgcttcagctatgtctaccgccaatacatacgcaccttat

SEQ ID NO: 373 - DNA, 327 bp, Staphylococcus aureus
cctggcgctattgtttcaggtccgtattctgttaattcattaatcggatcttttgtaatctcttcttttggttcacctttactaataattactccagttaatggattttttagtgttggtgtcgttattgtcttctcacctttttgtccttctcttgttactttttctgtccctggtgctaaatccggattaaatttacgttctttcttgaatggaatctcttcaacttttttttctaattctgttattgtttttggcgcttctggtgtaaaagtaaactctgaacctttcaagtcagttctcatccagccatttgcatttatccct

SEQ ID NO: 374 - DNA, 348 bp, Staphylococcus aureus
ttactaacatttattgctgttaaacctacgatgacaaataaaataatagctaatacttttaaaataactaaaatattttccatacgagctgcttccgacataccacgtgatagtaataatgcagttaataaaataacgatagcagcaataatatcgataaaaccgccatttgtaccaaatggatttgataatgctgcaggtaattcgatgccaattggtttcacaagtccgcgtaaattcgctgagaatcctgatgcaacaaaggctacggcgataaaatattcagctaatagagcccaaccggcaacccatccaaaaaattcaccaaataatacattgacccaagaa

SEQ ID NO: 375 - DNA, 219 bp, Staphylococcus aureus
gatgtgttgaaactgagttcaattaaattatatgtttttattatacactttttgacatattttttaaatttaagaatgcgaagatttttaacatttctgatgctagctttctttttcatctttcaaatgcttaataaaatcaaagccaggtcgccctttagccaatgcttccatcacatcataccaatccgaaccgacttgttgatatatattttgcaa

SEQ ID NO: 376 - DNA, 258 bp, Staphylococcus aureus
tctatcattgtaaatactgtatctaagtgcataaaagttcgactagttggaatttcaattgctactacttttttaaacgtcgcctgcggattttcaaaaatacgtcgcgctaacttttcaatagcttgtgcagatgtacgttctgaaacgcctatagccaagacatctttagataaaacaagttcatcgccgccttcaatattgaatgggcaatctcgatctaaccagattggaatattcgcatctttaaatctagga

SEQ ID NO: 377 - DNA, 135 bp, Staphylococcus aureus
gaagtcttggccattcccttgagtaaacatgaagccccagccatctgctcctgttgtattaccttggttgttgtttgctactggaacagtaattgtaaagtctttattaaaatctattttatcattatattctaa

SEQ ID NO: 378 - protein, 89 aa, Staphylococcus aureus
SIRCFLKNFSPHVQSINKSLVKNCDTTILIRLCIKPVCVNSIIAASMIGNPVCPSHHALKSASFCDHFICRYLGLKAWYEVSGYCVINT

SEQ ID NO: 379 - protein, 67 aa, Staphylococcus aureus
LLHHLVLLHLSQLILAQLPYQELTLVRKMDSHVLGLYPLIVYVQFQMFPYHRYQNQSIHRFDLQYFH

SEQ ID NO: 380 - protein, 43 aa, Staphylococcus aureus
DAPLGLIPGVTFKNDVPNFSVNIRLSRGEQTTPSKPAAFANLA

SEQ ID NO: 381 - protein, 77 aa, Staphylococcus aureus
YIKPLCLPIFLPSSVIISPGCAGKYCDKNVLKFFSPIKQMPVESFFLAVTSPCSSAIRRTSLFSMSPIGNITFESCC

SEQ ID NO: 382 - protein, 95 aa, Staphylococcus aureus
RFASSSYSNNGQSVTHKKFNFVSSIKPNSLANLTRNAPKLCATTFGLSATNITKSPASAPVNVSNVSTFSVSKKRPIGPVKPSSTTLTHANPLAP

SEQ ID NO: 383 - protein, 33 aa, Staphylococcus aureus
RQRPVHVFPKNNNPHGQYNHQYQHHYVTLANAF

SEQ ID NO: 384 - protein, 41 aa, Staphylococcus aureus
MNEASNLILTMPNESKAATKIAKIKPPITGAGIQIRFKKLT

SEQ ID NO: 385 - protein, 71 aa, Staphylococcus aureus
ILSAALSTPALLNNTSILPNCSFMSDTKSTTCCSLALSTLYAFALSPLLLILSTVSDTASAMSTANTYAPY

SEQ ID NO: 386 - protein, 109 aa, Staphylococcus aureus
PGAIVSGPYSVNSLIGSFVISSFGSPLLIITPVNGFFSVGVVIVFSPFCPSLVTFSVPGAKSGLNLRSFLNGISSTFFSNSVIVFGASGVKVNSEPFKSVLIQPFAFIP

SEQ ID NO: 387 - protein, 116 aa, Staphylococcus aureus
LLTFIAVKPTMTNKIIANTFKITKIFSIRAASDIPRDSNNAVNKITIAAIISIKPPFVPNGFDNAAGNSMPIGFTSPRKFAENPDATKATAIKYSANRAQPATHPKNSPNNTLTQE

SEQ ID NO: 388 - protein, 73 aa, Staphylococcus aureus
DVLKLSSIKLYVFIIHFLTYFLNLRMRRFLTFLMLAFFFIFQMLNKIKARSPFSQCFHHIIPIRTDLLIYILQ

SEQ ID NO: 389 - protein, 86 aa, Staphylococcus aureus
SIIVNTVSKCIKVRLVGISIATTFLNVACGFSKIRRANFSIACADVRSETPIAKTSLDKTSSSPPSILNGQSRSNQIGIFASLNLG

SEQ ID NO: 390 - protein, 44 aa, Staphylococcus aureus
EVLAIPLSKHEAPAICSCCITLVVVCYWNSNCKVFIKIYFIIIF

SEQ ID NO: 391 - DNA, 162 bp, Staphylococcus aureus
cgttgcacaaagctgaatgttaaaaatgcggatccgccagcaatgactgcaatccaacaatctgatgcgacaccaccaaacataaataggaagaagccacatgcaatggcagctgcaaagaaattcgttaaaaaagaatattgtaatgatgcatgctgtaaa

SEQ ID NO: 392 - protein, 54 aa, Staphylococcus aureus
RCTKLNVKNADPPAMTAIQQSDATPPNINRKKPHAMAAAKKFVKKEYCNDACCK

SEQ ID NO: 393 - DNA, 1845 bp, Staphylococcus aureus
atgactaataaaagagaagatgtccgcaatatagcaattattgctcacgttgaccatggtaaaacaactttagtagatgagttgttaaaacaatctggtatattcagagaaaatgaacatgtcgatgaacgtgcaatggactctaacgatatcgaaagagagcgtggaattacgattctagccaaaaatacggctgttgattataaaggtacacgtattaatattttggatacaccaggacatgcagactttggtggagaagtagaacgtattatgaaaatggttgatggggttgtcttagtagtagatgcgtatgaaggtacaatgcctcaaacacgttttgtacttaaaaaagcgctagaacaaaacctgaaacctgttgttgttgttaataaaattgataaaccatcagcacgtccagagggtgttgtagatgaagttttagatttatttattgaattagaagcaaacgatgaacaattagaattccctgttgtttatgcttcagcagtaaatggtacagctagcttagatcctgaaaagcaagatgataatttacaatcattatatgaaacaattattgattatgtaccagctccaattgataacagtgatgagccattacaattccaagtagcattgttggactacaatgattatgttggacgtattggtattggtcgtgtattcagaggtaaaatgcgtgtcggagataatgtatcactaattaaattagacggtacagtgaaaaacttccgtgtaactaaaatctttggttactttggattaaaacgtttagaaattgaagaagcacaagctggagatttaattgctgtttcaggtatggaagacattaatgttggtgaaactgtaacaccacatgaccatcaagaagcattgccagttctacgtattgatgagcctactcttgaaatgacatttaaagttaacaattctccatttgctggccgtgaaggtgactttgtaacagcacgtcaaattcaagaacgtttaaatcaacaattagaaacagatgtatctttgaaagtttctaacacagattctccagatacatgggtagttgctggtcgcggtgaattgcatttatcaatccttattgaaaatatgcgtcgtgaaggttatgaattacaagtttcaaaaccacaagtaattattaaagaaatagatggtgtaatgtgtgaaccatttgaacgtgtgcaatgtgaagtgccacaagaaaatgcaggtgctgttattgaatcattaggtgcacgtaaaggtgaaatggttgatatgactacaactgataatggacttacacgtttaatctttaatgtaccggctcgtggtatgattggttatacgactgaatttatgtcaatgacaagaggttacggtattattaaccatacatttgaagaatttagaccacgtattaaagcacaaattggcggtcgtcgtaatggtgcattaatttcaatggatcaaggttctgcaagtacttatgccattttgggacttgaagatagaggtgtaaacttcatggaacctggtactgaagtttatgaaggtatgattgttggtgaacataatcgtgaaaatgatttaactgttaacatcactaaaacaaaacatcaaactaacgtacgttctgcaacgaaagaccaaacacaaacaatgaatagaccgcgtattctaacattggaagaagcgttacaattcattaatgatgatgaacttgttgtggttacaccagaaagtatacgtttaagaaagaaaattttaaacaaaaatgttcgtgaaaaagaagcaaagcgtatcaaacaaatgatgcaagaaaacgaa

SEQ ID NO: 394 - DNA, 1260 bp, Staphylococcus aureus
gtgcttaggagtgatttttatatgtcttattccattgttagagtttcaaaagttaaatctggaacaaatacaacgggcatacaaaaacatgttcaaagagaaaataataattatgaaaatgaagatatagaccatagtaaaacttacttaaattatgatttggtaaatgctaataaacagaattttaataacttgattgatgaaaaaatcgaacagaattatacaggcaaaagaaaaattagaacagacgcgattaaacacattgatggtttaattacatcagacaatgatttctttgataatcaaacgccagaagatacaaagcagttttttgaatatgctaaagagtttttagaacaagaatacggtaaagataatttattatatgcaacagttcacatggacgaaaaaacaccacatatgcattatggcgttgttccaataactgatgatggtcgtttaagtgctaaagaagttgtaggtaataaaaaagctttaacagcgtttcaagatagatttaatgagcatgttaaacaacgaggatatgatttagaacgtgggcaatcaagacaagtaacaaatgctaaacatgagcaaataagtcagtataaacaaaaaacagaatatcataagcaagaatatgaacgtgagagccaaaaaacagaccatataaagcaaaagaacgataaattaatgcaagagtaccaaaaatcgttaaatacgcttaaaaagcctataaatgttccgtatgagcaagaaactgaaaaagtaggtggtttatttagcaaagaaatacaagaaactggaaatgttgtaataagccaaaaagatttcaatgaatttcagaaacagataaaagctgctcaagatatttcggaagattacgagtatataaagtctggtagagccttagatgataaagataaggaaatacgagagaaagatgatttattaaataaagcagttgagcgtattgaaaacgcagacgataattttaaccaactttacgaaaatgcaaagccacttaaagagaatatagaaatagcgttaaagcttttaaaaatcttactaaaagagttagaacgagttttaggaagaaatacctttgcggaaagagttaataagttaacagaagatgaaccaaaacttaatggtttagcaggaaacttagataaaaaaatgaatccagaattatattcagaacaggaacagcaacaagaacaacaaaagaatcaaaaacgagatagaggtatgcactta

SEQ ID NO: 395 - protein, 615 aa, Staphylococcus aureus
MTNKREDVRNIAIIAHVDHGKTTLVDELLKQSGIFRENEHVDERAMDSNDIERERGITILAKNTAVDYKGTRINILDTPGHADFGGEVERIMKMVDGVVLVVDAYEGTMPQTRFVLKKALEQNLKPVVVVNKIDKPSARPEGVVDEVLDLFIELEANDEQLEFPVVYASAVNGTASLDPEKQDDNLQSLYETIIDYVPAPIDNSDEPLQFQVALLDYNDYVGRIGIGRVFRGKMRVGDNVSLIKLDGTVKNFRVTKIFGYFGLKRLEIEEAQAGDLIAVSGMEDINVGETVTPHDHQEALPVLRIDEPTLEMTFKVNNSPFAGREGDFVTARQIQERLNQQLETDVSLKVSNTDSPDTWVVAGRGELHLSILIENMRREGYELQVSKPQVIIKEIDGVMCEPFERVQCEVPQENAGAVIESLGARKGEMVDMTTTDNGLTRLIFNVPARGMIGYTTEFMSMTRGYGIINHTFEEFRPRIKAQIGGRRNGALISMDQGSASTYAILGLEDRGVNFMEPGTEVYEGMIVGEHNRENDLTVNITKTKHQTNVRSATKDQTQTMNRPRILTLEEALQFINDDELVVVTPESIRLRKKILNKNVREKEAKRIKQMMQENE

SEQ ID NO: 396 - protein, 420 aa, Staphylococcus aureus
VLRSDFYMSYSIVRVSKVKSGTNTTGIQKHVQRENNNYENEDIDHSKTYLNYDLVNANKQNFNNLIDEKIEQNYTGKRKIRTDAIKHIDGLITSDNDFFDNQTPEDTKQFFEYAKEFLEQEYGKDNLLYATVHMDEKTPHMHYGVVPITDDGRLSAKEVVGNKKALTAFQDRFNEHVKQRGYDLERGQSRQVTNAKHEQISQYKQKTEYHKQEYERESQKTDHIKQKNDKLMQEYQKSLNTLKKPINVPYEQETEKVGGLFSKEIQETGNVVISQKDFNEFQKQIKAAQDISEDYEYIKSGRALDDKDKEIREKDDLLNKAVERIENADDNFNQLYENAKPLKENIEIALKLLKILLKELERVLGRNTFAERVNKLTEDEPKLNGLAGNLDKKMNPELYSEQEQQQEQQKNQKRDRGMHL

SEQ ID NO: 397 - DNA, 762 bp, Staphylococcus aureus
atgactgttgaagaaagatccaatacagccaaagttgacattttaggggtcgattttgataatacaacaatgttgcaaatggttgaaaatattaaaaccttttttgcaaatcaatcaacgaataatctttttatagtaacagccaaccctgaaatagtgaattacgcgacgacacatcaagcgtatttagagttaataaatcaagcgagctatattgttgctgatgggacaggagtagtcaaagcttcgcatcgtttaaagcaacctctagcgcatcgtatacctggtattgagttgatggatgaatgtttgaaaattgctcatgtaaatcatcaaaaagtatttttgctaggggcaactaatgaagttgtagaagcggcacaatatgcattgcaacaaagatatccaaacatatcgtttgcacatcatcacggttatattgatttagaagatgagacagtagtgaaacgaattaaactgtttaaacctgattacatatttgtaggtatgggattccctaaacaagaagaatggattatgacacatgaaaaccaatttgaatctacagtgatgatgggcgtaggtggttctcttgaagtatttgctggggctaaaaagagagcgccttatatctttagaaaattaaacattgaatggatatatagagcattaatagattggaaacgtattggtagattaaagagtattccaatatttatgtataaaatagccaaagcaaaaagaaaaataaaaaaggcgaaa

SEQ ID NO: 398 - protein, 254 aa, Staphylococcus aureus
MTVEERSNTAKVDILGVDFDNTTMLQMVENIKTFFANQSTNNLFIVTANPEIVNYATTHQAYLELINQASYIVADGTGVVKASHRLKQPLAHRIPGIELMDECLKIAHVNHQKVFLLGATNEVVEAAQYALQQRYPNISFAHHHGYIDLEDETVVKRIKLFKPDYIFVGMGFPKQEEWIMTHENQFESTVMMGVGGSLEVFAGAKKRAPYIFRKLNIEWIYRALIDWKRIGRLKSIPIFMYKIAKAKRKIKKAK

SEQ ID NO: 399 - DNA, 1506 bp, Staphylococcus aureus
atgagtgaaaattttaagttacgtaaaatgaaagtcggtttagtatctgttgcaattacaatgttatatattatgacaaacggacaagcagaagcatctgaaaatcaaaacgctttaatctctaatataaatgtagacaatcaggaaaaacagaataatgtaaatcaagctgttcagcctcaaaataatactaatgaaacatcaaaagtaccggctaattttgtcaaattgaatgatattaaaccaggtgatacttctatacaaggaacaactttaccaaatcaatttatactattaactattgataaaaaagatgtgagctcagttgaagattctgacagcagctttgttatgtctgataaagatgggaattttaagtatgacttaaatggtcgcaaaattgttcataatcaagaaattgaagtgtcttcatcagatccctatttaggtgacgatgaagaagatgaagaagtagaagaaacttcaactgaagaagttggtgctgaggaagaaagtacagaagctaaagctacatatacaacaccgcgatatgaaaaagcgtatgaaataccgaaagaacagctaaaagaaaaagatggacatcaccaagtttttatcgaacctattactgaaggttcaggtattattaaaggccatacctctgtaaaaggtaaagttgctctatctattaataataaatttattaactttgagacaaatgctaatggtggtccaaataaagaagaagcgaaatctggatcagaaggaatctggatgcctattgatgacaaaggatactttaattttgacttcaaaacgaaacgtttcgatgatttagagttaaagaaaaatgatgagatctcattaacatttgcacctgatgacgaagatgaggcattgaagtcattaattttcaaaactaaggtaacgagtttagaagatattgataaagcagaaactaaatatgaccatactaaagtggaaaaagtaaaagtattgaaagatgttaaagaagatttacatgtagatgaaatttacggaagcttatatcatacagaaaaaggtaaaggtattcttgataaagaaggtactaaagtaattaaaggtaagactaaattcgcaaatgcagttgtgaaggtagactctgaactaggtgaaggtcaagaattccctgatttgcaagtcgatgraaaaggtgaattcagctttgatgtagatcatgctggatttagattacaaaatggagaaacactaaacttcacagtagttgatcctattacaggtgaattattaagtggaaattttgtttctaaaaacatagatatttatgaatctcctgaagaaaaagcagatcgtgagtttgatgaaagaatggaaaacacacctgcatatcataaattacatggtgataaaattgtcggctacgatactaacggattcccgattacctggttttatccattaggtgaaaagaaagttgaacgtaaggcaccaaaattagaaaaa

SEQ ID NO: 400 - protein, 502 aa, Staphylococcus aureus
  MOD_RES (397): X = anything
MSENFKLRKMKVGLVSVAITMLYIMTNGQAEASENQNALISNINVDNQEKQNNVNQAVQPQNNTNETSKVPANFVKLNDIKPGDTSIQGTTLPNQFILLTIDKKDVSSVEDSDSSFVMSDKDGNFKYDLNGRKIVHNQEIEVSSSDPYLGDDEEDEEVEETSTEEVGAEEESTEAKATYTTPRYEKAYEIPKEQLKEKDGHHQVFIEPITEGSGIIKGHTSVKGKVALSINNKFINFETNANGGPNKEEAKSGSEGIWMPIDDKGYFNFDFKTKRFDDLELKKNDEISLTFAPDDEDEALKSLIFKTKVTSLEDIDKAETKYDHTKVEKVKVLKDVKEDLHVDEIYGSLYHTEKGKGILDKEGTKVIKGKTKFANAVVKVDSELGEGQEFPDLQVDXKGEFSFDVDHAGFRLQNGETLNFTVVDPITGELLSGNFVSKNIDIYESPEEKADREFDERMENTPAYHKLHGDKIVGYDTNGFPITWFYPLGEKKVERKAPKLEK

SEQ ID NO: 401 - DNA, 129 bp, Staphylococcus aureus
gtctatatgctatcaagtaccaggtttattgttaggtggtacaacaattgtaataagtccactaatatcattaatgaaagatcaagtggatcaattaaaagcgatgggaattcaagctgcttttttaaa

SEQ ID NO: 402 - protein, 43 aa, Staphylococcus aureus
VYMLSSTRFIVRWYNNCNKSTNIINERSSGSIKSDGNSSCFFK

SEQ ID NO: 403 - DNA, 387 bp, Staphylococcus aureus
tttaaatataaaaaaaacagaaaaatacctagtattatgatgcaacaaattaaaattactatactatattcatatttaacgataaataaatgggaataccttcttaacataacaccaaataagaccgtacttcctgccactggccaaaaagaattgattttagctgtcttcacaatgtttaaagtttcaaaatctttttcgctgattttgacgtacttttttggaatcagccaattaatcattgggaaaaagagtgctaaccatgtacttactaaatcaatcatcaaatattcatctttgtatttgataattctatatttgggattcttattaatattttcagtttcacaaagcaatgtctccacttcttttcaattggttttatat

SEQ ID NO: 404 - protein, 129 aa, Staphylococcus aureus
FKYKKNRKIPSIMMQQIKITILYSYLTINKWEYLLNITPNKTVLPATGQKELILAVFTMFKVSKSFSLILTYFFGISQLIIGKKSANHVLTKSIIKYSSLYLIILYLGFLLIFSVSQSNVSTSFQLVLY

SEQ ID NO: 405 - DNA, 183 bp, Staphylococcus aureus
ggaatgaaaatgatttcgatttccgatgaaatcaattgtttaatttgttgcaattgtgtagggttatgttcttttatttcttctgctaagtatattttttggatttccatttcttctaacactgtagctaagacatcaataaagcgtggtaagtttttagttacagctaggtcgatacgacga

SEQ ID NO: 406 - protein, 61 aa, Staphylococcus aureus
GMKMISISDEINCLICCNCVGLCSFISSAKYIFWISISSNTVAKTSIKRGKFLVTARSIRR

SEQ ID NO: 407 - DNA, 264 bp, Staphylococcus aureus
tttgaagctacaaaggtaccgcataatggcagcacattaattaacaatgcgctaaactttaatgaggcgctgatttgcttgtctttaaaagtcaacatagcactgataattcctaaaatagctactatacgtggaattgtcatgctcggatactgcggtatatgtaagaaagcaccaagacctgctatcacaccacatactaacgcaatatatagaaattgcttcaaatcattcactcctaaattgttattacactattacaca

SEQ ID NO: 408 - protein, 88 aa, Staphylococcus aureus
FEATKVPHNGSTLINNALNFNEALICLSLKVNIALIIPKIATIRGIVMLGYCGICKKAPRPAITPHTNAIYRNCFKSFTPKLLLHYYT

SEQ ID NO: 409 - DNA, 708 bp, Staphylococcus aureus
atgcttgctgctcgcatactattagaatctggtgcagaaggtacgcgtgtagaagataccatgacacgtattgcaaaaaaacttggttacagtgaaagtaacagctttgttacaaacactgtcatccagtttacgttacattcggaatcgtttcctagaatatttagaattacctctcgagatacaaacttaataaaaatttctcaagctaataaaatttcgcgtcaaattacaaacaatgaaatttctttagccgaagcaaaaacgcaacttgaaaaaatatatgttgctaagcgtgacagcagtcttccctttaaaggttttgctgcagcaatgattgcaatgagtttcttatatttacaaggtggtagattgattgatgttttaactgcgatattagcaggtagtctaggatacctagtcactgagattttagatcgtaagttacacgcacagtttatcccagaattcattggttcattagttattgggattatcgccgttattggacatacacttattccaacaggtgacttggcaactattatcattgcggcagtcatgcctattgttcctggtgtattaataacaaacgcaatacaagatttatttggtggacacatgttgatgttcacaacgaaatcattagaagcattggttactgcgtttggcatcggtgctggcgttggtagcgtattaattttagta

SEQ ID NO: 410 - protein, 236 aa, Staphylococcus aureus
MLAARILLESGAEGTRVEDTMTRIAKKLGYSESNSFVTNTVIQFTLHSESFPRIFRITSRDTNLIKISQANKISRQITNNEISLAEAKTQLEKIYVAKRDSSLPFKGFAAAMIAMSFLYLQGGRLIDVLTAILAGSLGYLVTEILDRKLHAQFIPEFIGSLVIGIIAVIGHTLIPTGDLATIIIAAVMPIVPGVLITNAIQDLFGGHMLMFTTKSLEALVTAFGIGAGVGSVLILV

SEQ ID NO: 411 - DNA, 948 bp, Staphylococcus aureus
atgacatttaataaagtattattgagctggatagtcatattgattataacaactagcatatatctattttggcagttgggcgatatcaatgatgtatttaaccagtctattttaatcaatgttagattaccgagattattagaagcattgttgacaggtatgatattaactgttgcaggccttatatttcaaacagttttaaataatgcattggcagatagctttacattaggattggcaagcggcgctacatttggttcaggattagcattatttttaggtttaacaacgttatggattcctgtattttcaataacatttagtttgataacattaataactgtattagtcattacgtcggtattgagccaaggctatccagttagaatcttaatattaagtggtttaatgattggtgcgttattcaattcacttctatattttttgattttattaaaacctcgcaaattaaatacaattgccaattatctgtttggtggttttggtgatgcagaatactcaaatgtatctataatagcaatcacatttatcattgcattgtttggtatatttatcattcttaatcaactaaagttattgcaattaggagaactaaaaagtcagtcactaggcttaaatgttcaattgattacatatatcgcgttatgtatagcttctatgataacggcgataaatgtcgcatatgttggcatcattggattcattggtatggtgataccgcaactcattagaaaatggcagtggaaacaatcattaggaagacaattggctttaaatattgtaactggaggacaaataatggttatggcagattttattggtagccatatattgtcaccagtacaaataccggcaagtattatcattgcattaattggtataccagtgttattttacatgctaatatctcagtcgaaacggttacac

SEQ ID NO: 412 - protein, 316 aa, Staphylococcus aureus
MTFNKVLLSWIVILIITTSIYLFWQLGDINDVFNQSILINVRLPRLLEALLTGMILTVAGLIFQTVLNNALADSFTLGLASGATFGSGLALFLGLTTLWIPVFSITFSLITLITVLVITSVLSQGYPVRILILSGLMIGALFNSLLYFLILLKPRKLNTIANYLFGGFGDAEYSNVSIIAITFIIALFGIFIILNQLKLLQLGELKSQSLGLNVQLITYIALCIASMITAINVAYVGIIGFIGMVIPQLIRKWQWKQSLGRQLALNIVTGGQIMVMADFIGSHILSPVQIPASIIIALIGIPVLFYMLISQSKRLH

SEQ ID NO: 413 - DNA, 1935 bp, Staphylococcus aureus
atgaacaaacagcaaaaagaatttaaatcattttattcaattagaaagtcatcactaggcgttgcatctgtagcaattagtacacttttattattaatgtcaaatggcgaagcacaagcagcagctgaagaaacaggtggtacaaatacagaagcacaaccaaaaactgaagcagttgcaagtccaacaacaacatctgaaaaagctccagaaactaaaccagtagctaatgctgtctcagtatctaataaagaagttgaggcccctacttctgaaacaaaagaagctaaagaagttaaagaagttaaagcccctaaggaaacaaaagaagttaaaccagcagcaaaagccactaacaatacatatcctattttgaatcaggaacttagagaagcgattaaaaaccctgcaataaaagacaaagatcatagcgcaccaaactctcgtccaattgattttgaaatgaaaaagaaagatggaactcaacagttttatcattatgcaagttctgttaaacctgctagagttattttcactgattcaaaaccagaaattgaattaggattacaatcaggtcaattttggagaaaatttgaagtttatgaaggtgacaaaaagttgccaattaaattagtatcatacgatactgttaaagattatgcttacattcgcttctctgtatcaaacggaacaaaagctgttaaaattgttagttcaacacacttcaataacaaagaagaaaaatacgattacacattaatggaattcgcacaaccaatttataacagtgcagataaattcaaaactgaagaagattataaagctgaaaaattattagcgccatataaaaaagcgaaaacactagaaagacaagtttatgaattaaataaaattcaagataaacttcctgaaaaattaaaggctgagtacaagaagaaattagaggatacaaagaaagctttagatgagcaagtgaaatcagctattactgaattccaaaatgtacaaccaacaaatgaaaaaatgactgatttacaagatacaaaatatgttgtttatgaaagtgttgagaataacgaatctatgatggatacttttgttaaacaccctattaaaacaggtatgcttaacggcaaaaaatatatggtcatggaaactactaatgacgattactggaaagatttcatggttgaaggtcaacgtgttagaactataagcaaagatgctaaaaataatactagaacaattattttcccatatgttgaaggtaaaactctatatgatgctatcgttaaagttcacgtaaaaacgattgattatgatggacaataccatgtcagaatcgttgataaagaagcatttacaaaagccaataccgataaatctaacaaaaaagaacaacaagataactcagctaagaaggaagctactccagctacgcctagcaaaccaacaccatcacctgttgaaaaagaatcacaaaaacaagacagccaaaaagatgacaataaacaattaccaagtgttgaaaaagaaaatgacgcatctagtgagtcaggtaaagacaaaacgcctgctacaaaaccaactaaaggtgaagtagaatcaagtagtacaactccaactaaggtagtatctacgactcaaaatgttgcaaaaccaacaactgcttcatcaaaaacaacaaaagatgttgttcaaacttcagcaggttctagcgaagcaaaagatagtgctccattacaaaaagcaaacattaaaaacacaaatgatggacacactcaaagccaaaacaataaaaatacacaagaaaataaagcaaaatcattaccacaaactggtgaagaatcaaataaagatatgacattaccattaatggcattattagctttaagtagcatcgttgcattcgtattacctagaaaacgtaaaaac

SEQ ID NO: 414 - protein, 645 aa, Staphylococcus aureus
MNKQQKEFKSFYSIRKSSLGVASVAISTLLLLMSNGEAQAAAEETGGTNTEAQPKTEAVASPTTTSEKAPETKPVANAVSVSNKEVEAPTSETKEAKEVKEVKAPKETKEVKPAAKATNNTYPILNQELREAIKNPAIKDKDHSAPNSRPIDFEMKKKDGTQQFYHYASSVKPARVIFTDSKPEIELGLQSGQFWRKFEVYEGDKKLPIKLVSYDTVKDYAYIRFSVSNGTKAVKIVSSTHFNNKEEKYDYTLMEFAQPIYNSADKFKTEEDYKAEKLLAPYKKAKTLERQVYELNKIQDKLPEKLKAEYKKKLEDTKKALDEQVKSAITEFQNVQPTNEKMTDLQDTKYVVYESVENNESMMDTFVKHPIKTGMLNGKKYMVMETTNDDYWKDFMVEGQRVRTISKDAKNNTRTIIFPYVEGKTLYDAIVKVHVKTIDYDGQYHVRIVDKEAFTKANTDKSNKKEQQDNSAKKEATPATPSKPTPSPVEKESQKQDSQKDDNKQLPSVEKENDASSESGKDKTPATKPTKGEVESSSTTPTKVVSTTQNVAKPTTASSKTTKDVVQTSAGSSEAKDSAPLQKANIKNTNDGHTQSQNNKNTQENKAKSLPQTGEESNKDMTLPLMALLALSSIVAFVLPRKRKN

SEQ ID NO: 415 - DNA, 624 bp, Staphylococcus aureus
atgaattatccaaatggtaaaccatatcgtaaaaatagtgctatagacggagggaaaaagaccgctgcctttagtaatattgagtatggtggacgtggtatgtcacttgaaaaagatatcgaacattcaaatacgttttatcttaaaagcgacattgcagttattcacaaaaagcctacgccagtacaaatagttaatgtcaactatcctaagcggagtaaagctgtgattaacgaagcttattttcgtacaccttcaacaactgattacaacggcgtttatcaaggttattatattgattttgaagcaaaggaaactaaaaacaagacgtcctttcctttaaataatattcatgaccatcaagtcgaacatatgaaaaatgcatatcaacaaaaaggtattgtgtttttaatgattcgttttaaaacgctagatgaagtttatcttttaccctattcaaaattcgaagtattttggaagagatataaagataatattaaaragtctataacagttgatgaaatacgaaaaaatggttaccatattccttatcagtatcaaccaagattagactatctaaaagcagttgataagttgatattagatgaaagtgaggaccgcgta

SEQ ID NO: 416 - protein, 208 aa, Staphylococcus aureus
  MOD_RES (168): X = anything
MNYPNGKPYRKNSAIDGGKKTAAFSNIEYGGRGMSLEKDIEHSNTFYLKSDIAVIHKKPTPVQIVNVNYPKRSKAVINEAYFRTPSTTDYNGVYQGYYIDFEAKETKNKTSFPLNNIHDHQVEHMKNAYQQKGIVFLMIRFKTLDEVYLLPYSKFEVFWKRYKDNIKXSITVDEIRKNGYHIPYQYQPRLDYLKAVDKLILDESEDRV

SEQ ID NO: 417 - DNA, 1137 bp, Staphylococcus aureus
ttgatatatctagataatgcggcaacgacgaaagcatttgaagaagtgttagatacttatttaaaagtaaatcaatcaatgtattataatccgaatagtccgcataaagctggtttgcaggcaaatcaattactacaacaagcaaaaacccaaattaatgcaatgattaattcaaaaacaaattatgatgttgtattcactagtggtgcaactgaatccaataatcttgctttaaaaggtattgcctatcgtaaatttgatacagcgaaggaaataattacatccgtgttagagcatccgtccgtattagaggttgtaagatatttggaagcacacgaaggatttaaagttaaatatgttgatgtaaagaaagatggcagtattaacttagaacacttcaaagaattaatgtcagacaaagtcggtttagtaacatgtatgtatgtaaataatgtaactggacaaatacagcctattccacaaatggctaaagttataaaaaattatcctaaggcacattttcatgtagatgcggttcaagcattcggcaaaatttcaatggatctcaataacatagatagtattagtttaagtggacacaagtttaatggtttaaaaggacaaggcgtcttacttgtaaatcacattcaaaatgttgaaccaactgtccatggtggtggtcaagaatatggcgttagaagtggaacagttaatttgccaaatgatattgcaatggttaaagcgatgaagatagctaatgaaaactttgaagcattgaatgcatttgttactgagttaaataatgacgtccgtcaatttttaaataaatatcatggagtttatattaattcttcaacttcaggttcaccattcgttttaaatattagttttcctggcgtaaaaggtgaagtattagttaatgctttttcaaaatatgacattatgatatctacgacaagtgcttgttcatctaaacgtaataaattaaatgaagtattggctgcaatgggattatcagacaaatctattgaaggtagtataagattatcatttggggctactacaactaaagaagatatagcgaggtttaaagaaatatttatcatcatttatgaggaaattaaggagttgctaaaa

SEQ ID NO: 418 - protein, 379 aa, Staphylococcus aureus
LIYLDNAATTKAFEEVLDTYLKVNQSMYYNPNSPHKAGLQANQLLQQAKTQINAMINSKTNYDVVFTSGATESNNLALKGIAYRKFDTAKEIITSVLEHPSVLEVVRYLEAHEGFKVKYVDVKKDGSINLEHFKELMSDKVGLVTCMYVNNVTGQIQPIPQMAKVIKNYPKAHFHVDAVQAFGKISMDLNNIDSISLSGHKFNGLKGQGVLLVNHIQNVEPTVHGGGQEYGVRSGTVNLPNDIAMVKAMKIANENFEALNAFVTELNNDVRQFLNKYHGVYINSSTSGSPFVLNISFPGVKGEVLVNAFSKYDIMISTTSACSSKRNKLNEVLAAMGLSDKSIEGSIRLSFGATTTKEDIARFKEIFIIIYEEIKELLK

SEQ ID NO: 419 - DNA, 1257 bp, Staphylococcus aureus
atgtcatatcattggtttaagaaaatgttactttcaacaagtattttaattttaagtagtagtagtttagggcttgcaacgcacacagttgaagcaaaggataacttaaatggagaaaaaccaactactaatttgaatcataatataacttcaccatcagtaaatagtgaaatgaataataatgagactgggacacctcacgaatcaaatcaaacgggtaatgaaggaacaggttcgaatagtcgtgatgctaatcctgattcgaataatgtgaagccagactcaaacaaccaaaacccaagtacagattcaaaaccagacccaaataaccaaaacccaagtccgaatcctaaaccagatccagataacccgaaaccaaaaccggatccaaaaccagacccagataaaccaaagccaaatccggatccaaaaccagatccagataacccgaaaccaaatccagatccaaaaccagacccagataaaccaaagccaaatccggatccaaaaccagatccagataaaccaaagccaaatccgaatccaaaaccagaccctaataagccaaatcctaacccgtcaccagatcccgatcaacctggggattccaatcattctggtggctcgaaaaatggggggacatggaacccaaatgcttcagatggatctaatcaaggtcaatggcaaccaaatgggaatcaaggaaactcacaaaatcctactggtaatgattttgtatcccaacgatttttagccttggcaaatggggcttacaagtataatccgtatattttaaatcaaattaataagttgggcaaagattatggagaagttactgatgaagacatttataatattattcgaaaacaaaatttcagcggaaatgcatatttaaatggattacaacagcaatcgaattactttagattccaatatttcaatccattgaaatcagaaaggtactatcgtaatttagatgaacaagtactcgcattaattactggtgaaattggatcaatgccagatttgaaaaagcccgaagataagccggattcaaaacaacgctcatttgaaccgcatgaaaaagacgattttacagtagttaaaaaacaagaagataataagaaaagtgcgtcaactgcatatagtaaaagttggctagcaattgtatgttctatgatggtggtattttcaatcatgctattcttatttgtaaagcgaaataaaaagaaaaataaaaacgaatcacagcgacga

SEQ ID NO: 420 - protein, 419 aa, Staphylococcus aureus
MSYHWFKKMLLSTSILILSSSSLGLATHTVEAKDNLNGEKPTTNLNHNITSPSVNSEMNNNETGTPHESNQTGNEGTGSNSRDANPDSNNVKPDSNNQNPSTDSKPDPNNQNPSPNPKPDPDNPKPKPDPKPDPDKPKPNPDPKPDPDNPKPNPDPKPDPDKPKPNPDPKPDPDKPKPNPNPKPDPNKPNPNPSPDPDQPGDSNHSGGSKNGGTWNPNASDGSNQGQWQPNGNQGNSQNPTGNDFVSQRFLALANGAYKYNPYILNQINKLGKDYGEVTDEDIYNIIRKQNFSGNAYLNGLQQQSNYFRFQYFNPLKSERYYRNLDEQVLALITGEIGSMPDLKKPEDKPDSKQRSFEPHEKDDFTVVKKQEDNKKSASTAYSKSWLAIVCSMMVVFSIMLFLFVKRNKKKNKNESQRR

SEQ ID NO: 421 - DNA, 3729 bp, Staphylococcus aureus
atgagagataagaaaggaccggtaaataaaagagtagattttctatcaaataaattgaataaatattcaataagaaaatttacagttggaacagcatctattttaattggctcactaatgtatttgggaactcaacaagaggcagaagcagctgaaaacaatattgagaatccaactacattaaaagataatgtccaatcaaaagaagtgaagattgaagaagtaacaaacaaagacactgcaccacagggtgtagaagctaaatctgaagtaacttcaaacaaagacacaatcgaacatgaaccatcagtaaaagctgaagatatatcaaaaaaggaggatacaccaaaagaagtagctgatgttgctgaagttcagccgaaatcgtcagtcactcataacgcagagacacctaaggttagaaaagctcgttctgttgatgaaggctcttttgatattacaagagattctaaaaatgtagttgaatctaccccaattacaattcaaggtaaagaacattttgaaggttacggaagtgttgatatacaaaaaaaaccaacagatttaggggtatcagaggtaaccaggtttaatgttggtaatgaaagtaatggtttgataggagctttacaattaaaaaataaaatagattttagtaaggatttcaattttaaagttagagtggcaaataaccatcaatcaaataccacaggtgctgatggttgggggttcttatttagtaaaggaaatgcagaagaatatttaactaatggtggaatccttggggataaaggtctggtaaattcaggcggatttaaaattgatactggatacatttatacaagttccatggacaaaactgaaaagcaagctggacaaggttatagaggatacggagcttttgtgaaaaatgacagttctggtaattcacaaatggttggagaaaatattgataaatcaaaaactaattttttaaactatgcggacaattcaactaatacatcagatggaaagtttcatgggcaacgtttaaatgatgtcatcttaacttatgttgcttcaactggtaaaatgagagcagaatatgctggtaaaacttgggagacttcaataacagatttaggtttatctaaaaatcaggcatataatttcttaattacatctagtcaaagatggggccttaatcaagggataaatgcaaatggctggatgagaactgacttgaaaggttcagagtttacttttacaccagaagcgccaaaaacaataacagaattagaaaaaaaagttgaagagattccattcaagaaagaacgtaaatttaatccggatttagcaccagggacagaaaaagtaacaagagaaggacaaaaaggtgagaagacaataacgacaccaacactaaaaaatccattaactggagtaattattagtaaaggtgaaccaaaagaagagattacaaaagatccgattaatgaattaacagaatacggacctgaaacaatagcgccaggtcatcgagacgaatttgatccgaagttaccaacaggagagaaagaggaagttccaggtaaaccaggaattaagaatccagaaacaggagacgtagttagaccaccggtcgatagcgtaacaaaatatggacctgtaaaaggagactcgattgtagaaaaagaagagattccattcgagaaagaacgtaaatttaatccggatttagcaccagggacagaaaaagtaacaagagaaggacaaaaaggtgagaagacaataacgacaccaacactaaaaaatccattaactggagtaattattagtaaaggtgaaccaaaagaagaaatcacaaaagatccgattaatgaattaacagaatacggaccagaaacgataacaccaggtcatcgagacgaatttgatccgaagttaccaacaggagagaaagaggaagttccaggtaaaccaggaattaagaatccagaaacaggagacgtagttagaccaccggtcgatagcgtaacaaaatatggacctgtaaaaggagactcgattgtagaaaaagaagaaattccattcaagaaagaacgtaaatttaatccggatttagcaccagggacagaaaaagtaacaagagaaggacaaaaaggtgagaagacaataacgacgccaacactaaaaaatccattaactggagaaattattagtaaaggtgaatcgaaagaagaaatcacaaaagatccgattaatgaattaacagaatacggaccagaaacgataacaccaggtcatcgagacgaatttgatccgaagttaccaacaggagagaaagaggaagttccaggtaaaccaggaattaagaatccagaaacaggagacgtagttagaccaccggtcgatagcgtaacaaaatatggacctgtaaaaggagactcgattgtagaaaaagaagaaattccattcaagaaagaacgtaaatttaatcctgatttagcaccagggacagaaaaagtaacaagagaaggacaaaaaggtgagaagacaataacgacgccaacactaaaaaatccattaactggagaaattattagtaaaggtgaatcgaaagaagaaatcacaaaagatccgattaatgaattaacagaatacggaccagaaacgataacaccaggtcatcgagacgaatttgatccgaagttaccaacaggagagaaagaggaagttccaggtaaaccaggaattaagaatccagaaacaggagatgtagttagaccaccggtcgatagcgtaacaaaatatggacctgtaaaaggagactcgattgtagaaaaagaagaaattccattcgagaaagaacgtaaatttaatcctgatttagcaccagggacagaaaaagtaacaagagaaggacaaaaaggtgagaagacaataacgacgccaacactaaaaaatccattaactggagaaattattagtaaaggtgaatcgaaagaagaaatcacaaaagatccagttaatgaattaacagaattcggtggcgagaaaataccgcaaggtcataaagatatctttgatccaaacttaccaacagatcaaacggaaaaagtaccaggtaaaccaggaatcaagaatccagacacaggaaaagtgatcgaagagccagtggatgatgtgattaaacacggaccaaaaacgggtacaccagaaacaaaaacagtagagataccgtttgaaacaaaacgtgagtttaatccaaaattacaacctggtgaagagcgagtgaaacaagaaggacaaccaggaagtaagacaatcacaacaccaatcacagtgaacccattaacaggtgaaaaagttggcgagggtcaaccaacagaagagatcacaaaacaaccagtagataagattgtagagttcggtggagagaaaccaaaagatccaaaaggacctgaaaacccagagaagccgagcagaccaactcatccaagtggcccagtaaatcctaacaatccaggattatcgaaagacagagcaaaaccaaatggcccagttcattcaatggataaaaatgataaagttaaaaaatctaaaattgctaaagaatcagtagctaatcaagagaaaaaacgagcagaattaccaaaaacaggtttagaaagcacgcaaaaaggtttgatctttagtagtataattggaattgctggattaatgttattggctcgtagaagaaagaat

SEQ ID NO: 422 - protein, 1243 aa, Staphylococcus aureus
MRDKKGPVNKRVDFLSNKLNKYSIRKFTVGTASILIGSLMYLGTQQEAEAAENNIENPTTLKDNVQSKEVKIEEVTNKDTAPQGVEAKSEVTSNKDTIEHEPSVKAEDISKKEDTPKEVADVAEVQPKSSVTHNAETPKVRKARSVDEGSFDITRDSKNVVESTPITIQGKEHFEGYGSVDIQKKPTDLGVSEVTRFNVGNESNGLIGALQLKNKIDFSKDFNFKVRVANNHQSNTTGADGWGFLFSKGNAEEYLTNGGILGDKGLVNSGGFKIDTGYIYTSSMDKTEKQAGQGYRGYGAFVKNDSSGNSQMVGENIDKSKTNFLNYADNSTNTSDGKFHGQRLNDVILTYVASTGKMRAEYAGKTWETSITDLGLSKNQAYNFLITSSQRWGLNQGINANGWMRTDLKGSEFTFTPEAPKTITELEKKVEEIPFKKERKFNPDLAPGTEKVTREGQKGEKTITTPTLKNPLTGVIISKGEPKEEITKDPINELTEYGPETIAPGHRDEFDPKLPTGEKEEVPGKPGIKNPETGDVVRPPVDSVTKYGPVKGDSIVEKEEIPFEKERKFNPDLAPGTEKVTREGQKGEKTITTPTLKNPLTGVIISKGEPKEEITKDPINELTEYGPETITPGHRDEFDPKLPTGEKEEVPGKPGIKNPETGDVVRPPVDSVTKYGPVKGDSIVEKEEIPFKKERKFNPDLAPGTEKVTREGQKGEKTITTPTLKNPLTGEIISKGESKEEITKDPINELTEYGPETITPGHRDEFDPKLPTGEKEEVPGKPGIKNPETGDVVRPPVDSVTKYGPVKGDSIVEKEEIPFKKERKFNPDLAPGTEKVTREGQKGEKTITTPTLKNPLTGEIISKGESKEEITKDPINELTEYGPETITPGHRDEFDPKLPTGEKEEVPGKPGIKNPETGDVVRPPVDSVTKYGPVKGDSIVEKEEIPFEKERKFNPDLAPGTEKVTREGQKGEKTITTPTLKNPLTGEIISKGESKEEITKDPVNELTEFGGEKIPQGHKDIFDPNLPTDQTEKVPGKPGIKNPDTGKVIEEPVDDVIKHGPKTGTPETKTVEIPFETKREFNPKLQPGEERVKQEGQPGSKTITTPITVNPLTGEKVGEGQPTEEITKQPVDKIVEFGGEKPKDPKGPENPEKPSRPTHPSGPVNPNNPGLSKDRAKPNGPVHSMDKNDKVKKSKIAKESVANQEKKRAELPKTGLESTQKGLIFSSIIGIAGLMLLARRRKN

SEQ ID NO: 423 - DNA, 2820 bp, Staphylococcus aureus
gtgaaaagcaatcttagatacggcataagaaaacacaaattgggagcggcctcagtattcttaggaacaatgatcgttgttggaatgggacaagaaaaagaagctgcagcatcggaacaaaacaatactacagtagaggaaagtgggagttcagctactgaaagtaaagcaagcgaaacacaaacaactacaaataacgttaatacaatagatgaaacacaatcatacagcgcgacatcaactgagcaaccatcacaatcaacacaagtaacaacagaagaagcaccgaaaactgtgcaagcaccaaaagtagaaacttcgcgagttgatttgccatcggaaaaagttgctgataaggaaactacaggaactcaagttgacatagctcaaccaagtaacgtctcagaaattaaaccaagaatgaaaagatcaactgacgttacagcagttgcagagaaagaagtagtggaagaaactaaagcgacaggtacagatgtaacaaataaagtggaagtagaagaaggtagtgaaattgtaggacataaacaagatacgaatgttgtaaatcctcataacgcagaaagagtaaccttgaaatataaatggaaatttggagaaggaattaaggcgggagattattttgatttcacattaagcgataatgttgaaactcatggtatctcaacactgcgtaaagttccggagataaaaagtacagatggtcaagttatggcgacaggagaaataattggagaaagaaaagttagatatacgtttaaagaatatgtacaagaaaagaaagatttaactgctgaattatctttaaatctatttattgatcctacaacagtgacgcaaaaaggtaaccaaaatgttgaagttaaattgggtgagactacggttagcaaaatatttaatattcaatatttaggtggagttagagataattggggagtaacagctaatggtcgaattgatactttaaataaagtagatgggaaatttagtcattttgcgtacatgaaacctaacaaccagtcgttaagctctgtgacagtaactggtcaagtaactaaaggaaataaaccaggggttaataatccaacagttaaggtatataaacacattggttcagacgatttagctgaaagcgtatatgcaaagcttgatgatgtcagcaaatttgaagatgtgactgataatatgagtttagattttgatactaatggtggttattctttaaactttaataatttagaccaaagtaaaaattatgtaataaaatatgaagggtattatgattcaaatgctagcaacttagaatttcaaacacacctttttggatattataactattattatacaagtaatttaacttggaaaaatggcgttgcattttactctaataacgctcaaggcgacggcaaagataaactaaaggaacctattatagaacatagtactcctatcgaacttgaatttaaatcagagccgccagtggagaagcatgaattgactggtacaatcgaagaaagtaatgattctaagccaattgattttgaatatcatacagctgttgaaggtgcagaaggtcatgcagaaggtaccattgaaactgaagaagattctattcatgtagactttgaagaatcgacacatgaaaattcaaaacatcatgctgatgttgttgaatatgaagaagatacaaacccaggtggtggtcaggttactactgagtctaacctagttgaatttgacgaagattctacaaaaggtattgtaactggtgctgttagcgatcatacaacaattgaagatacgaaagaatatacgactgaaagtaatctgattgaactagtagatgaactacctgaagaacatggtcaagcgcaaggaccaatcgaggaaattactgaaaacaatcatcatatttctcattctggtttaggaactgaaaatggtcacggtaattatggcgtgattgaagaaatcgaagaaaatagccacgtggatattaagagtgaattaggttacgaaggtggccaaaatagcggtaatcagtcatttgaggaagacacagaagaagataaaccgaaatatgaacaaggtggcaatatcgtagatatcgatttcgatagtgtacctcaaattcatggtcaaaataatggtaaccaatcattcgaagaagatacagagaaagacaaacctaagtatgaacaaggtggtaatatcattgatatcgacttcgacagtgtgccacatattcacggattcaataagcacactgaaattattgaagaagatacaaataaagataaaccaaattatcaattcggtggacacaatagtgttgactttgaagaagatacacttccacaagtaagtggtcataatgaaggtcaacaaacgattgaagaagatacaacacctccaatcgtgccaccaacgccaccgacaccagaagtaccaagcgagccggaaacaccaacaccaccgacaccagaagtaccaagcgagccggaaacaccaacaccgccaacgccagaggtaccaactgaacctggtaaaccaataccacctgctaaagaagaacctaaaaaaccttctaaaccagtggaacaaggtaaagtagtaacacctgttattgaaatcaatgaaaaggttaaagcagtggtaccaactaaaaaagcacaatctaagaaatctgaactacctgaaacaggtggagaagaatcaacaaacaacggcatgttgttcggcggattatttagcattttaggtttagcgttattacgcagaaataaaaagaatcacaaagca

SEQ ID NO: 424 - protein, 940 aa, Staphylococcus aureus
VKSNLRYGIRKHKLGAASVFLGTMIVVGMGQEKEAAASEQNNTTVEESGSSATESKASETQTTTNNVNTIDETQSYSATSTEQPSQSTQVTTEEAPKTVQAPKVETSRVDLPSEKVADKETTGTQVDIAQPSNVSEIKPRMKRSTDVTAVAEKEVVEETKATGTDVTNKVEVEEGSEIVGHKQDTNVVNPHNAERVTLKYKWKFGEGIKAGDYFDFTLSDNVETHGISTLRKVPEIKSTDGQVMATGEIIGERKVRYTFKEYVQEKKDLTAELSLNLFIDPTTVTQKGNQNVEVKLGETTVSKIFNIQYLGGVRDNWGVTANGRIDTLNKVDGKFSHFAYMKPNNQSLSSVTVTGQVTKGNKPGVNNPTVKVYKHIGSDDLAESVYAKLDDVSKFEDVTDNMSLDFDTNGGYSLNFNNLDQSKNYVIKYEGYYDSNASNLEFQTHLFGYYNYYYTSNLTWKNGVAFYSNNAQGDGKDKLKEPIIEHSTPIELEFKSEPPVEKHELTGTIEESNDSKPIDFEYHTAVEGAEGHAEGTIETEEDSIHVDFEESTHENSKHHADVVEYEEDTNPGGGQVTTESNLVEFDEDSTKGIVTGAVSDHTTIEDTKEYTTESNLIELVDELPEEHGQAQGPIEEITENNHHISHSGLGTENGHGNYGVIEEIEENSHVDIKSELGYEGGQNSGNQSFEEDTEEDKPKYEQGGNIVDIDFDSVPQIHGQNNGNQSFEEDTEKDKPKYEQGGNIIDIDFDSVPHIHGFNKHTEIIEEDTNKDKPNYQFGGHNSVDFEEDTLPQVSGHNEGQQTIEEDTTPPIVPPTPPTPEVPSEPETPTPPTPEVPSEPETPTPPTPEVPTEPGKPIPPAKEEPKKPSKPVEQGKVVTPVIEINEKVKAVVPTKKAQSKKSELPETGGEESTNNGMLFGGLFSILGLALLRRNKKNHKA

SEQ ID NO: 425 - DNA, 2316 bp, Staphylococcus aureus
atgaaagctttattacttaaaacaagtgtatggctcgttttgctttttagtgtaatgggattatggcaagtctcgaacgcggctgagcagcatacaccaatgaaagcacatgcagtaacaacgatagacaaagcaacaacagataagcaacaagtaccgccaacaaaggaagcggctcatcattctggcaaagaagcggcaaccaacgtatcagcatcagcgcagggaacagctgatgatacaaacagcaaagtaacatccaacgcaccatctaacaaaccatctacagtagtttcaacaaaagtaaacgaaacacgcgacgtagatacacaacaagcctcaacacaaaaaccaactcacacagcaacgttcaaattatcaaatgctaaaacagcatcactttcaccacgaatgtttgctgctaatgcaccacaaacaacaacacataaaatattacatacaaatgatatccatggccgactagccgaagaaaaagggcgtgtcatcggtatggctaaattaaaaacagtaaaagaacaagaaaagcctgatttaatgttagacgcaggagacgccttccaaggtttaccactttcaaaccagtctaaaggtgaagaaatggctaaagcaatgaatgcagtaggttatgatgctatggcagtcggtaaccatgaatttgactttggatacgatcagttgaaaaagttagagggtatgttagacttcccgatgctaagtactaacgtttataaagatggaaaacgcgcgtttaagccttcaacgattgtaacaaaaaatggtattcgttatggaattattggtgtaacgacaccagaaacaaagacgaaaacaagacctgaaggcattaaaggcgttgaatttagagatccattacaaagtgtgacagcggaaatgatgcgtatttataaagacgtagatacatttgttgttatatcacatttaggaattgatccttcaacacaagaaacatggcgtggtgattacttagtgaaacaattaagtcaaaatccacaattgaagaaacgtattacagttattgatggtcattcacatacagtacttcaaaatggtcaaatttataacaatgatgcattggcacaaacaggtacagcacttgcgaatatcggtaagattacatttaattatcgcaatggagaggtatcgaatattaaaccgtcattgattaatgttaaagacgttgaaaatgtaacaccgaacaaagcattagctgaacaaattaatcaagctgatcaaacatttagagcacaaactgcagaggtaattattccaaacaataccattgatttcaaaggagaaagagatgacgttagaacgcgtgaaacaaatttaggaaacgcgattgcagatgctatggaagcgtatggcgttaagaatttctctaaaaagactgactttgccgtgacaaatggtggaggtattcgtgcctctatcgcaaaaggtaaggtgacacgctatgatttaatctcagtattaccatttggaaatacgattgcgcaaattgatgtaaaaggttcagacgtctggacggctttcgaacatagtttaggcgcaccaacaacacaaaaggacggtaagacagtgttaacagcgaatggcggtttactacatatctctgattcaatccgtgtttactatgatataaataaaccgtctggcaaacgaattaatgctattcaaattttaaataaagagacaggtaagtttgaaaatattgatttaaaacgtgtatatcacgtaacgatgaatgacttcacagcatcaggtggcgacggatatagtatgttcggtggtcctagagaagaaggtatttcattagatcaagtactagcaagttatttaaaaacagctaacttagctaagtatgatacgacagaaccacaacgtatgttattaggtaaaccagcagtaagtgaacaaccagctaaaggacaacaaggtagcaaaggtagtaagtctggtaaagatacacaaccaattggtgacgacaaagtgatggatccagcgaaaaaaccagctccaggtaaagttgtattgttgctagcgcatagaggaactgttagtagcggtacagaaggttctggtcgcacaatagaaggagctactgtatcaagcaagagtgggaaacaattggctagaatgtcagtgcctaaaggtagcgcgcatgagaaacagttaccaaaaactggaactaatcaaagttcaagcccagaagcgatgtttgtattattagcaggtataggtttaatcgcgactgtacgacgtagaaaagctagc

SEQ ID NO: 426 - protein, 772 aa, Staphylococcus aureus
MKALLLKTSVWLVLLFSVMGLWQVSNAAEQHTPMKAHAVTTIDKATTDKQQVPPTKEAAHHSGKEAATNVSASAQGTADDTNSKVTSNAPSNKPSTVVSTKVNETRDVDTQQASTQKPTHTATFKLSNAKTASLSPRMFAANAPQTTTHKILHTNDIHGRLAEEKGRVIGMAKLKTVKEQEKPDLMLDAGDAFQGLPLSNQSKGEEMAKAMNAVGYDAMAVGNHEFDFGYDQLKKLEGMLDFPMLSTNVYKDGKRAFKPSTIVTKNGIRYGIIGVTTPETKTKTRPEGIKGVEFRDPLQSVTAEMMRIYKDVDTFVVISHLGIDPSTQETWRGDYLVKQLSQNPQLKKRITVIDGHSHTVLQNGQIYNNDALAQTGTALANIGKITFNYRNGEVSNIKPSLINVKDVENVTPNKALAEQINQADQTFRAQTAEVIIPNNTIDFKGERDDVRTRETNLGNAIADAMEAYGVKNFSKKTDFAVTNGGGIRASIAKGKVTRYDLISVLPFGNTIAQIDVKGSDVWTAFEHSLGAPTTQKDGKTVLTANGGLLHISDSIRVYYDINKPSGKRINAIQILNKETGKFENIDLKRVYHVTMNDFTASGGDGYSMFGGPREEGISLDQVLASYLKTANLAKYDTTEPQRMLLGKPAVSEQPAKGQQGSKGSKSGKDTQPIGDDKVMDPAKKPAPGKVVLLLAHRGTVSSGTEGSGRTIEGATVSSKSGKQLARMSVPKGSAHEKQLPKTGTNQSSSPEAMFVLLAGIGLIATVRRRKAS

SEQ ID NO: 427 - DNA, 4911 bp, Staphylococcus aureus
atgaataaaaattcgaagaagaagctcgattttcttccaaacaagcttaataagtactcaattagacgtttcactgtagggacagcttcgattttagtaggagctactttaattttcggtgttgcaaatgatcaagcagaagccgctgagaataacacaactcaaaagcaagatgatagttcagatgcaagtaaagtaaaaggtaatgttcaaactattgaacaatcttctgcaaattcaaatgaatctgatattcctgaacaagttgatgtaactaaagatacaactgaacaagcatcaacagaagaaaaagcaaatacaactgaacaagcatcaacagaagaaaaagcagatacaactgaacaagcaacaacagaagaagcgccaaaagctgaaggaacagacaaagtagaaacagaagaagcgccaaaagctgaagaaacagacaaagcaacaacagaagaagcgccaaaagctgaagaaacagacaaagcaacagaagaagcaccaaaaactgaagaaacagacaaagcaacaacagaagaagcgccagcagctgaagaaacaagcaaagcagcaacagaagaagcgccaaaagctgaagaaacaagcaaagcagcaacagaagaagcgccaaaagctgaagaaacagaaaaaacagcaacagaagaagcaccaaaaactgaagaaacagacaaagtagaaacagaagaagcgccaaaagctgaagaaacaagcaaagcagcaacagaaaaagcaccaaaagctgaagaaacaaacaaagtagaaacagaagaagcgccagcagctgaagaaacaaacaaagcagcaacagaagaaacaccagcagttgaagacacaaatgctaagagcaattcaaatgctcaaccatcagaaactgagagaactcaagttgtagatacagttgctaaagatttatataaaaaatctgaagttacagaagcagaaaaagctgaaattgaaaaagtattaccaaaagatatttcaaacttatctaatgaagaaattaaaaaaatagctttaagtgaagtacttaaagaaacagctaacaaagaaaacgcacaaccaagagcaacattccgttcagtaagcagcaatgctagaacaacaaatgttaactattcagcaacagcattaagagcagctgcacaagacacagttactaaaaaaggaactggtaactttactgcgcatggagatataatccataaaacttataaagaagaattccctaatgaaggcacgctaactgcattcaatacaaacttcaatcctaatacaggaactaaaggcgcattagaatataatgataaaatagattttaataaagactttacaattactgttccagtagcaaacaacaaccaaggtaatacaacaggagcagatggctggggcttcatgtttactcaagggaatggccaagacttcttaaaccaaggtggtattttaagagacaaaggtatggcaaatgcatctggttttaaaattgatacggcatataataatgttaatggtaaagtcgataaactcgatgcagataaaacaaacaatctaagtcaaattggcgcagcaaaagttggttacggtacatttgttaaaaatggtgcagatggtgtgactaaccaagttggtcaaaatgccctaaatacaaaagataaacctgtaaataaaataatttatgcagataatacaactaatcatcttgatggtcaattccatggccaaagattaaatgatgtagtattaaattatgatgcagcaacaagtacaataactgctacatatgcaggaaaaacatggaaagctactacagatgatttaggaattgataaatcacaaaaatataatttcttaattacttcaagtcatatgcaaaatagatattctaatggaattatgagaacaaatcttgaaggtgtaacaattacaacgcctcaagctgatttaattgatgatgtggaagtaacgaaacaaccaattcctcataaaactattcgtgagtttgatccaactctagaaccaggctcacctgatgttattgtacaaaaaggtgaagatggagagaaaacaacaactacaccaactaaagttgaccctgatacaggagatgtagttgaacgtggtgaaccaacaacagaagttacaaaaaatccagttgacgagattgtacactttacacctgaagaagtaccacaaggtcataaagatgagttcgatccaaacttaccaattgacggtacagaagaagtaccaggtaaaccaggcatcaagaatcctgaaacaggtgaagtagtaacacctccggttgacgatgtcacaaaacatggtccaaaagcaggcgaaccagaggttactaaagaagaaataccattcgagaaaaaacgtgagttcaatccagacttaaaaccaggtgaagagaaagtaacgcaagaaggacaaactggagagaaaacaacaacaacgccaacaacaattaatccattaacgggagaaaaagtaggcgaaggtgaaccaacaacagaagtaacaaaagaaccagtagatgaaatcacacaattcggtggagaagaagtaccacaaggtcataaagatgagttcgatccaaacttaccaattgacggtacagaagaagtaccaggtaaaccaggcatcaagaatcctgaaacaggtgaagtagtaacacctccggttgacgatgtcacaaaacatggtccaaaagcaggcgaaccagaggttactaaagaagaaataccattcgagaaaaaacgtgagttcaatccagacttaaaaccaggtgaagagaaagtaacgcaagaaggacaaactggagagaaaacaacaacaacgccaacaacaattaatccattaacgggagaaaaagtaggcgaaggtgaaccaacaacagaagtaacaaaagaaccagtagatgaaatcacacaattcggtggagaagaagtaccacaaggtcataaagatgagttcgatccaaacttaccaattgacggtacagaagaagtaccaggtaaaccaggcatcaagaatcctgaaacaggtgaagtagtaacacctccggttgacgatgtcacaaaacatggtccaaaagcaggcgaaccagaggttactaaagaagaaataccattcgagaaaaaacgtgagttcaatccagacttaaaaccaggtgaagagaaagtaacgcaagaaggacaaactggagagaaaacaacaacaacgccaacaacaattaatccattaacgggagaaaaagtaggcgaaggtgaaccaacaacagaagtaacaaaagaaccagtagatgaaatcacacaattcggtggagaagaagtaccacaaggtcataaagatgagttcgatccaaacttaccaattgacggtacagaagaagtaccaggtaaaccaggcatcaagaatcctgaaacaggtgaagtagtaacaccaccagtagacgatgtcacaaaacatggtccaaaagcaggcgaaccagaggttactaaagaagaaattccatatgaaactaaacgcgtattagatccaacaatggaaccaggtagtcctgataaagtagctcaaaaaggtgaaaatggtgaaaaaacaacaacaacaccaactacaattaatccattaacgggagaaaaagtaggcgaaggcgaaccaacaacggaagtaacgaaagaaccaatagacgaaattgttaactatgcacctgaaattattcctcatggtacacgtgaagaaattgatccaaacttaccagaaggtgaaactaaagttatcccaggtaaagatggcttgaaagatcctgaaactggagaaatcattgaagaaccacaagatgaagtaatcatccatggtgctaaagatgattcagatgcggacagcgattcagacgcagatagcgattctgatgcagacagcgactcagacgcagatagcgactctgatgcggacagcgattcagacagcgatagcgattcagattcagatagcgactctgatgcggacagcgattcagacagcgatagcgattcagacgcagatagcgattctgatgcagacagcgactcagacgcagatagcgactcagattcagacgcagatagcgactcagattcagacgcagatagcgactcagattcagacagcgactcagacgcagacagcgactcagattcagacagcgattcagacgcagacagcgactcagacgcagatagcgactcagattcagacagcgattcagacgcagatagcgattcagattcagatagtgactctgatgcggacagcgactcagacgcagatagcgactctgatgcggacagcgactcagacgcagatagcgattctgattcagacagcgattcagacgcagatagcgactcagacgcagatagcgattcagacgcagatagcgactcagacgcagatagcgattcagattcagatagcgactctgatgcggacagcgatagcgattcagattcagacagcgactcagacgcagatagcgactcagacgcagatagcgatagcgattctgatgcagacagcgactcagacgcagatagcgactctgatgcggacggcgactcagacgcagatagcgattctgatgcagacagcgactcagacagcgatagcgattctgattcagacagcgattcagacgcagatagcgactcagattcagacagcgattcagacgcagatagagatcataatgacaaaacagataaaccaaataataaagagttaccagatactggtaatgatgctcaaaataatggcacattatttggttcactattcgctgcgcttggaggattattcttagttggcagacgtcgtaaaaacaaaaataatgaagaaaaa

SEQ ID NO: 428 - protein, 1637 aa, Staphylococcus aureus
MNKNSKKKLDFLPNKLNKYSIRRFTVGTASILVGATLIFGVANDQAEAAENNTTQKQDDSSDASKVKGNVQTIEQSSANSNESDIPEQVDVTKDTTEQASTEEKANTTEQASTEEKADTTEQATTEEAPKAEGTDKVETEEAPKAEETDKATTEEAPKAEETDKATEEAPKTEETDKATTEEAPAAEETSKAATEEAPKAEETSKAATEEAPKAEETEKTATEEAPKTEETDKVETEEAPKAEETSKAATEKAPKAEETNKVETEEAPAAEETNKAATEETPAVEDTNAKSNSNAQPSETERTQVVDTVAKDLYKKSEVTEAEKAEIEKVLPKDISNLSNEEIKKIALSEVLKETANKENAQPRATFRSVSSNARTTNVNYSATALRAAAQDTVTKKGTGNFTAHGDIIHKTYKEEFPNEGTLTAFNTNFNPNTGTKGALEYNDKIDFNKDFTITVPVANNNQGNTTGADGWGFMFTQGNGQDFLNQGGILRDKGMANASGFKIDTAYNNVNGKVDKLDADKTNNLSQIGAAKVGYGTFVKNGADGVTNQVGQNALNTKDKPVNKIIYADNTTNHLDGQFHGQRLNDVVLNYDAATSTITATYAGKTWKATTDDLGIDKSQKYNFLITSSHMQNRYSNGIMRTNLEGVTITTPQADLIDDVEVTKQPIPHKTIREFDPTLEPGSPDVIVQKGEDGEKTTTTPTKVDPDTGDVVERGEPTTEVTKNPVDEIVHFTPEEVPQGHKDEFDPNLPIDGTEEVPGKPGIKNPETGEVVTPPVDDVTKHGPKAGEPEVTKEEIPFEKKREFNPDLKPGEEKVTQEGQTGEKTTTTPTTINPLTGEKVGEGEPTTEVTKEPVDEITQFGGEEVPQGHKDEFDPNLPIDGTEEVPGKPGIKNPETGEVVTPPVDDVTKHGPKAGEPEVTKEEIPFEKKREFNPDLKPGEEKVTQEGQTGEKTTTTPTTINPLTGEKVGEGEPTTEVTKEPVDEITQFGGEEVPQGHKDEFDPNLPIDGTEEVPGKPGIKNPETGEVVTPPVDDVTKHGPKAGEPEVTKEEIPFEKKREFNPDLKPGEEKVTQEGQTGEKTTTTPTTINPLTGEKVGEGEPTTEVTKEPVDEITQFGGEEVPQGHKDEFDPNLPIDGTEEVPGKPGIKNPETGEVVTPPVDDVTKHGPKAGEPEVTKEEIPYETKRVLDPTMEPGSPDKVAQKGENGEKTTTTPTTINPLTGEKVGEGEPTTEVTKEPIDEIVNYAPEIIPHGTREEIDPNLPEGETKVIPGKDGLKDPETGEIIEEPQDEVIIHGAKDDSDADSDSDADSDSDADSDSDADSDSDADSDSDSDSDSDSDSDSDADSDSDSDSDSDADSDSDADSDSDADSDSDSDADSDSDSDADSDSDSDSDSDADSDSDSDSDSDADSDSDADSDSDSDSDSDADSDSDSDSDSDADSDSDADSDSDADSDSDADSDSDSDSDSDADSDSDADSDSDADSDSDADSDSDSDSDSDADSDSDSDSDSDSDADSDSDADSDSDSDADSDSDADSDSDADGDSDADSDSDADSDSDSDSDSDSDSDSDADSDSDSDSDSDADRDHNDKTDKPNNKELPDTGNDAQNNGTLFGSLFAALGGLFLVGRRRKNKNNEEK

SEQ ID NO: 429 - DNA, 1524 bp, Staphylococcus aureus
ttgaaaaagaaaaacatttattcaattcgtaaactaggtgtaggtattgcatctgtaactttaggtacattacttatatctggtggcgtaacacctgctgcaaatgctgcgcaacacgatgaagctcaacaaaatgctttttatcaagtcttaaatatgcctaacttaaatgctgatcaacgcaatggttttatccaaagccttaaagatgatccaagccaaagtgctaacgttttaggtgaagctcaaaaacttaatgactctcaagctccaaaagctgatgcgcaacaaaataacttcaacaaagatcaacaaagcgccttctatgaaatcttgaacatgcctaacttaaacgaagcgcaacgtaacggcttcattcaaagtcttaaagacgacccaagccaaagcactaacgttttaggtgaagctaaaaaattaaacgaatctcaagcaccgaaagctgataacaatttcaacaaagaacaacaaaatgctttctatgaaatcttgaatatgcctaacttaaacgaagaacaacgcaatggtttcatccaaagcttaaaagatgacccaagccaaagtgctaacctattgtcagaagctaaaaagttaaatgaatctcaagcaccgaaagcggataacaaattcaacaaagaacaacaaaatgctttctatgaaatcttacatttacctaacttaaacgaagaacaacgcaatggtttcatccaaagcctaaaagatgacccaagccaaagcgctaaccttttagcagaagctaaaaagctaaatgatgctcaagcaccaaaagctgacaacaaattcaacaaagaacaacaaaatgctttctatgaaattttacatttacctaacttaactgaagaacaacgtaacggcttcatccaaagccttaaagacgatccttcagtgagcaaagaaattttagcagaagctaaaaagctaaacgatgctcaagcaccaaaagaggaagacaataacaagcctggcaaagaagacaataacaagcctggcaaagaagacaacaacaagcctggtaaagaagacaacaacaagcctggcaaagaagacggcaacaagcctggtaaagaagacaacaaaaaacctggtaaagaagatggcaacaagcctggtaaagaagacaacaaaaaacctggtaaagaagacggcaacaagcctggcaaagaagatggcaacaaacctggtaaagaagatggtaacggagtacatgtcgttaaacctggtgatacagtaaatgacattgcaaaagcaaacggcactactgctgacaaaattgctgcagataacaaattagctgataaaaacatgatcaaacctggtcaagaacttgttgttgataagaagcaaccagcaaaccatgcagatgctaacaaagctcaagcattaccagaaactggtgaagaaaatccattcatcggtacaactgtatttggtggattatcattagccttaggtgcagcgttattagctggacgtcgtcgcgaacta

SEQ ID NO: 430 - protein, 508 aa, Staphylococcus aureus
LKKKNIYSIRKLGVGIASVTLGTLLISGGVTPAANAAQHDEAQQNAFYQVLNMPNLNADQRNGFIQSLKDDPSQSANVLGEAQKLNDSQAPKADAQQNNFNKDQQSAFYEILNMPNLNEAQRNGFIQSLKDDPSQSTNVLGEAKKLNESQAPKADNNFNKEQQNAFYEILNMPNLNEEQRNGFIQSLKDDPSQSANLLSEAKKLNESQAPKADNKFNKEQQNAFYEILHLPNLNEEQRNGFIQSLKDDPSQSANLLAEAKKLNDAQAPKADNKFNKEQQNAFYEILHLPNLTEEQRNGFIQSLKDDPSVSKEILAEAKKLNDAQAPKEEDNNKPGKEDNNKPGKEDNNKPGKEDNNKPGKEDGNKPGKEDNKKPGKEDGNKPGKEDNKKPGKEDGNKPGKEDGNKPGKEDGNGVHVVKPGDTVNDIAKANGTTADKIAADNKLADKNMIKPGQELVVDKKQPANHADANKAQALPETGEENPFIGTTVFGGLSLALGAALLAGRRREL

SEQ ID NO: 431 - DNA, 891 bp, Staphylococcus aureus
atgaagaaaacaattttactgacgatgacaactcttactttatttagtatgtcgcctaactcggctcaagcatatacgaatgatagcaaaacattagaagaagcaaagaaagcacacccaaacgcacagttcaaagtgaataaagacaccggcgcgtatacttatacatatgacaaaaacaacacgccaaacaacaatcatcaaaaccagtcacgtacaaacgacaatcatcaacacgcaaatcaacgtgatcttaacaacaatcagtaccattcttcattaagtggtcagtatacgcacattaatgacgcaattgattcacacacaccgcctcaaacgtcaccaagcaatcctttgacaccagcaataccgaatgtcgaagacaatgacgatgaattaaataacgctttttcaaaagataacaaagggcttattacaggcatcgatttagacgaattgtatgacgaattacaaatcgccgaatttaatgacaaagcaaagaccgctgacggtaaacctttagcattaggtaacggtaaaatcattgatcagcctcttatcacaagtaagaacaacttatatactgctggacaatgtacatggtatgtctttgataaacgtgccaaagatggacacacgattagtacattttggggagatgctaaaaactgggcaggccaagcttcaagcaatggcttcaaagtagatagacacccaacacgaggatcaattttacaaacagtaaatggtccatttggtcatgtagcctacgttgaaaaagttaatattgatggaagtattctaatttcagaaatgaactggattggtgaatatatcgtttcatcaagaaccatctctgcttcagaagtttcatcatataattacatccat

SEQ ID NO: 432 - protein, 297 aa, Staphylococcus aureus
MKKTILLTMTTLTLFSMSPNSAQAYTNDSKTLEEAKKAHPNAQFKVNKDTGAYTYTYDKNNTPNNNHQNQSRTNDNHQHANQRDLNNNQYHSSLSGQYTHINDAIDSHTPPQTSPSNPLTPAIPNVEDNDDELNNAFSKDNKGLITGIDLDELYDELQIAEFNDKAKTADGKPLALGNGKIIDQPLITSKNNLYTAGQCTWYVFDKRAKDGHTISTFWGDAKNWAGQASSNGFKVDRHPTRGSILQTVNGPFGHVAYVEKVNIDGSILISEMNWIGEYIVSSRTISASEVSSYNYIH

SEQ ID NO: 433 - DNA, 1311 bp, Staphylococcus aureus
atgaatcaatatcattctaatgcacaacaaccaagtgcatggcgtttttttgtctatagtttagtgggcatactatgtttctttattccttttacgattaatggtaacaacactattttcgtcgatcatgttcatctagccattcgctcaatcataggtccacttatgccctatgttgcactgattatgattttaattggtacagcgttaccaatagtgagacgtacttttatgacttcaatcacaaacttggtcattacattatttaaagttgcaggtgcaatgatcggtataatgtatgtatttaaaatcggtccatcaatactatttaaagctaactatggtccgtttttgtttgaaaaattaatgatgccattaagtatcttaattccagtaggtgcaattgcgctttctttattagtgggctatggcttattagaatttgtcggtgtttatatggagcctattatgagacctatttttaaaacaccaggaaaatccgctgtcgatgcagtggcttcgtttgtcggcagttattccttaggattattgattactaatcgtgtctataagcaagggatgtacaacaaacgagaagccacgattattgcgactggcttttcaacagtttcagcaacttttatgattatcgttgctaaaactttaggattaatgccgcattggaatttatacttttggataactttagtcatcacatttgtcgtgactgcaattactgcatggctaccgccaatcagcaatgaatcaacagaatattataacggacaagaaggagaacaagaagttgctattgaaggaagcagactgaaaactgcatatgcagaggcgatgaaacaaaatgcattaacaccatctctcgtgaagaacgtttgggacaatttgaaagacggtttagaaatgactgttggtattttaccttctatattatcgattggttttttaggactgattgtagcgaactatacaccattcattgattggcttggctatatcttctatccatttatttatattttcccaattgctgatcaggctttactagcaaaagcgtcagcgatttctattgtagagatgtttctaccatctttgttagtaactaaagctgcaatgagtactaaatttgtcgtcggtgtagtaagcgtatcagccattatctttttctcagcattagtgccatgtatactagcaactgaaattaaaatacctgtctggaaactcatcatcatttggtttttacgcgtggcgttgtcgctattaatcaccatccccgtcgctttacttatttttgga

SEQ ID NO: 434 - protein, 437 aa, Staphylococcus aureus
MNQYHSNAQQPSAWRFFVYSLVGILCFFIPFTINGNNTIFVDHVHLAIRSIIGPLMPYVALIMILIGTALPIVRRTFMTSITNLVITLFKVAGAMIGIMYVFKIGPSILFKANYGPFLFEKLMMPLSILIPVGAIALSLLVGYGLLEFVGVYMEPIMRPIFKTPGKSAVDAVASFVGSYSLGLLITNRVYKQGMYNKREATIIATGFSTVSATFMIIVAKTLGLMPHWNLYFWITLVITFVVTAITAWLPPISNESTEYYNGQEGEQEVAIEGSRLKTAYAEAMKQNALTPSLVKNVWDNLKDGLEMTVGILPSILSIGFLGLIVANYTPFIDWLGYIFYPFIYIFPIADQALLAKASAISIVEMFLPSLLVTKAAMSTKFVVGVVSVSAIIFFSALVPCILATEIKIPVWKLIIIWFLRVALSLLITIPVALLIFG

SEQ ID NO: 435 - DNA, 1056 bp, Staphylococcus aureus
atgaaaatgagaacaattgctaaaaccagtttagcactagggcttttaacaacaggcgcaattacagtaacgacgcaatcggtcaaagcagaaaaaatacaatcaactaaagttgacaaagtaccaacgcttaaagcagagcgattagcaatgataaacataacagcaggtgcaaattcagcgacaacacaagcagctaacacaagacaagaacgcacgcctaaactcgaaaaggcaccaaatactaatgaggaaaaaacctcagcttccaaaatagaaaaaatatcacaacctaaacaagaagagcagaaaacgcttaatatatcagcaacgccagcgcctaaacaagaacaatcacaaacgacaaccgaatccacaacgccgaaaactaaagtgacaacacctccatcaacaaacacgccacaaccaatgcaatctactaaatcagacacaccacaatctccaaccataaaacaagcacaaacagatatgactcctaaatatgaagatttaagagcgtattatacaaaaccgagttttgaatttgaaaagcagtttggatttatgctcaaaccatggacgacggttaggtttatgaatgttattccaaataggttcatctataaaatagctttagttggaaaagatgagaaaaaatataaagatggaccttacgataatatcgatgtatttatcgttttagaagacaataaatatcaattgaaaaaatattctgtcggtggcatcacgaagactaatagtaaaaaagttaatcacaaagtagaattaagcattactaaaaaagataatcaaggtatgatttcacgcgatgtttcagaatacatgattactaaggaagagatttccttgaaagagcttgattttaaattgagaaaacaacttattgaaaaacataatctttacggtaacatgggttcaggaacaatcgttattaaaatgaaaaacggtgggaaatatacgtttgaattacacaaaaaactgcaagagcatcgtatggcaggcactaatattgataacattgaagtgaatataaaa

SEQ ID NO: 436 - protein, 352 aa, Staphylococcus aureus
MKMRTIAKTSLALGLLTTGAITVTTQSVKAEKIQSTKVDKVPTLKAERLAMINITAGANSATTQAANTRQERTPKLEKAPNTNEEKTSASKIEKISQPKQEEQKTLNISATPAPKQEQSQTTTESTTPKTKVTTPPSTNTPQPMQSTKSDTPQSPTIKQAQTDMTPKYEDLRAYYTKPSFEFEKQFGFMLKPWTTVRFMNVIPNRFIYKIALVGKDEKKYKDGPYDNIDVFIVLEDNKYQLKKYSVGGITKTNSKKVNHKVELSITKKDNQGMISRDVSEYMITKEEISLKELDFKLRKQLIEKHNLYGNMGSGTIVIKMKNGGKYTFELHKKLQEHRMAGTNIDNIEVNIK

SEQ ID NO: 437 - DNA, 924 bp, Staphylococcus aureus
atgaaaataacaacgattgctaaaacaagtttagcactaggccttttaacaacaggtgtaatcacaacgacaacgcaagcagcaaacgcgacaacaccatcttccactaaagtggaagcaccacaatcaacaccgccctcaactaaaatagaagcaccgcaatcaaaaccaaacgcgacaacaccgccctcaactaaagtagaagcaccgcaacaaacagcaaatgcgacaacaccgccttcaactaaagtgacaacacctccatcaacaaacacgccacaaccaatgcaatctactaaatcagacacaccacaatcgccaaccacaaaacaagtaccaacagaaataaatcctaaatttaaagatttaagagcgtattatacgaaaccaagtttagaatttaaaaatgagattggtattattttaaaaaaatggacgacaataagatttatgaatgttgtcccagattatttcatatataaaattgctttagttggtaaagatgataaaaaatatggtgaaggagtacataggaatgtcgatgtatttgtcgttttagaagaaaataattacaatctggaaaaatattctgtcggtggtatcacaaagagtaatagtaaaaaagttgatcacaaagcaggagtaagaattactaaggaagataataaaggtacaatctctcatgatgtttcagaattcaagattactaaagaacagatttccttgaaagaacttgattttaaattgagaaaacaacttattgaaaaaaataatctgtacggtaacgttggttcaggtaaaattgttattaaaatgaaaaacggtggaaagtacacgtttgaattgcacaaaaaattacaagaaaatcgcatggcagatgtcattaatagtgaacaaattaaaaacatcgaagtgaatttgaaa

SEQ ID NO: 438 - protein, 308 aa, Staphylococcus aureus
MKITTIAKTSLALGLLTTGVITTTTQAANATTPSSTKVEAPQSTPPSTKIEAPQSKPNATTPPSTKVEAPQQTANATTPPSTKVTTPPSTNTPQPMQSTKSDTPQSPTTKQVPTEINPKFKDLRAYYTKPSLEFKNEIGIILKKWTTIRFMNVVPDYFIYKIALVGKDDKKYGEGVHRNVDVFVVLEENNYNLEKYSVGGITKSNSKKVDHKAGVRITKEDNKGTISHDVSEFKITKEQISLKELDFKLRKQLIEKNNLYGNVGSGKIVIKMKNGGKYTFELHKKLQENRMADVINSEQIKNIEVNLK

SEQ ID NO: 439 - DNA, 31497 bp, Staphylococcus aureus
gtgaattatcgtgataaaattcaaaagtttagtattcgtaaatatacagttggtacattttcaactgtcattgcgacattggtatttttaggattcaatacatcacaagcacatgctgctgaaacaaatcaaccagcaagcgtggttaaacagaaacaacaaagtaataatgaacagactgagaatcgagaatctcaagtacaaaattctcaaaattcacaaaatggtcaatcattatctgctactcatgaaaatgagcaaccaaatattagtcaagctaatttagtagatcaaaaagtagcgcaatcatctactactaatgatgaacaaccagcatctcaaaatgtaaatacaaagaaagattcggcaacggctgcgacaacacaaccagataaagaacaaagtaagcataaacaaaacgaaagtcaatctgctaataaaaatggaaacgacaatagagcggctcatgtagaaaatcatgaagcaaatgtagtaacagcttcagattcatctgataatggtaacgtacaacatgaccgaaatgaattacaagcgttttttgatgcaaattatcatgattatcgctttattgaccgtgaaaatgcagattctggcacatttaactatgtaaaaggcatttttgataagattaatacgttattaggcagtaatgatccaataaacaataaagacttgcaacttgcatacaaagaattggaacaagctgttgctttaattcgtacaatgcctcaacgtcaacagactagccgacgttcaaatagaattcaaacgcgttcggttgagtcaagagctgcagagcctagatcagtatcagactatcaaaatgcaaattcatcatattatgttgaaaatgctaatgatggttcgggctatcctgttggtacatatatcaatgcttctagtaaaggggcgccatataatttaccaactacaccatggaatacattgaaggcctctgactcaaaggaaattgctcttatgacagcgaaacaaactggagacgggtaccaatgggttattaagtttaataaaggacatgctccacatcaaaatatgatcttttggtttgcattaccagcagaccaagtgccagtaggaagaactgactttgtaacagttaattcagatggaacaaatgtacaatggagtcatggagcaggagcaggtgcaaataaaccacttcaacaaatgtgggaatatggagtaaatgatcctcatcgttcacatgactttaaaataagaaatagaagtggccaagtaatatatgactggccaactgtccatatttattctttagaagatttatctagagcgagtgattattttagtgaagctggagcgacacctgctactaaagcttttggtagacaaaattttgaatatattaatggtcaaaaacctgctgaatcaccgggtgttcctaaagtttatactttcatcggtcaaggtgatgcaagttatacaatttcatttaaaacacaaggtccaactgttaataaattgtactatgcagcaggtgggcgtgctttagagtacaatcaattatttatgtacagtcaactatacgtcgaatcaacgcaagaccatcaacaacgtcttaatggtttaagacaagtggttaatcgtacatatcgcataggtacaactaaacgtgtagaagtgagtcaaggaaatgtacaaacgaaaaaggtattagaaagtacaaacctaaatatagatgattttgttgatgatcctttaagttatgttaagacgccgagtaataaagtgttaggattttattcgaataatgcaaatactaatgcttttagaccgggtggagcccaacaattaaatgaatatcaattaagtcaattatttactgatcaaaaattacaagaagcagcaagaactagaaacccaataagattaatgattggtttcgactatcctgatgcttatggtaatagtgaaactttagttcctgttaacttaacggtattacctgaaatccaacataatattaaattctttaaaaatgacgatactcaaaatattgctgaaaaaccattttcaaaacaagctgggcatccagttttctatgtatatgcaggtaaccaagggaatgcttccgtgaatttaggtggtagcgtaacatctattcaaccattacgtattaatttaacaagtaatgagaattttacagataaagattggcaaattacaggtattccgcgtacattacacattgaaaactcgacaaatagacctaataatgccagagaacgcaatattgaacttgttggtaacttattaccaggggattactttggaacgatacgttttggacgtaaagaacaattattcgaaattcgtgttaaaccacatacaccaacaattacaacgacagctgagcaattaagaggtacagcattacaaaaagtgcctgttaatatttcgggaataccgttggatccatcggcattggtttatttagttgcaccaacaaatcaaactacgaatggtggtagtgaggcagatcaaataccatctggttatacgatacttgcgactggtacacctgatggggtgcataatacaattactatacgaccgcaagattatgttgtattcataccacctgtaggtaaacaaattagagcagtagtttattataataaagtagttgcatctaatatgagtaatgctgttactattttgccagatgacattccaccaacaatcaataatcctgttggaataaatgccaaatactatcgaggcgacgaagtcaactttacaatgggtgtctctgatagacattctggtataaaaaatacaactattacgacattgccgaatggttggacatcaaatttaacaaaagcggataagaataatggctcattatctattacaggtagagtgagtatgaatcaggcatttaacagtgatattacatttaaagtgtcagcgacagacaatgtcaataatacgacaaatgatagtcaatctaaacatgtttcaattcatgtaggtaaaattagtgaagatgctcatccgattgtattaggaaatactgagaaagttgtagtagtcaatccgactgctgtatctaatgatgaaaagcaaagcataattactgcctttatgaataaaaaccaaaatataagaggatatttagcatcaactgatccagtaactgtcgataataatggtaatgtcacattacattaccgtgatggctcatcgacaacgcttgatgctacaaatgtgatgacatacgaaccagttgtgaaacctgaataccaaactgtcaatgctgctaaaacagcaacggtaacgattgctaaaggacaatcatttagtattggtgatattaaacaatattttactttaagtaatggacaacctattccaagtggcacatttacaaatattacatctgatagaactattccaactgcacaagaagttagtcaaatgaacgcaggcacgcagttataccatataactgctacaaatgcgtatcataaagatagtgaagacttctatattagtttgaaaatcatcgatgtgaaacaaccagaaggcgatcaacgtgtatatcgtacatcaacatatgatttaactactgatgaaatctcaaaagtaaaacaagcatttattaatgcaaatagagatgtaattacgcttgccgaaggtgatatttcagttacaaatacacctaatggtgctaatgtaagtactattacagtaaatattaataaaggtcgattaacgaaatcattcgcgtcaaacctagctaatatgaatttcttgcgttgggttaatttcccacaagattatacagtgacatggacgaatgcaaaaattgcaaacagaccaacagatggtggtttatcatggtctgatgaccataaatctttaatttatcgttatgatgctacattaggtactcaaattacgacgaatgatattttaacaatgttaaaagcaacaactacagtgcctggattgcgaaataacattactggtaatgaaaaatcacaagcagaagctggcggaagacctaactttagaacgactggttattcacaatcaaatgcgacaactgatggtcaacgtcaatttacgttgaatggtcaagtgattcaagtgttagacatcatcaacccttcaaacggttatggtgggcaacctgttacaaattcaaatactcgtgcaaaccatagtaactcaactgttgttaacgtaaacgaaccggcagctaatggtgctggcgcatttacaattgaccacgttgtaaaaagtaattctacacataatgcaagtgatgcagtttataaagcacagttatacttaacgccatatggtccaaaacaatatgttgaacatttaaatcaaaatacaggaaatactactgacgctattaacatttattttgtaccaagtgacttagtgaatccaacaatttcagtaggtaattacactaatcatcaagtgttctcaggtgaaacatttacaaatactattacagcgaatgataactttggtgtgcaatctgtaactgtaccaaatacatcacaaattacaggtactgttgataataaccatcaacatgtttctgcaacggcaccaaatgtgacatcagcaactaataagacaatcaatttattagcaactgatacaagcggcaatacagctacaacttcgttcaatgtaacagtgaaacctttgcgtgataaatatcgagttggtacttcatcaacggctgctaatcctgtgagaattgccaatatttcgaataatgcgacagtatcacaagctgatcaaacgacaattattaattcgttaacgtttactgaaacagtaccaaatagaagttatgcaagagcaagtgcgaatgaaatcactagtaaaacagttagtaatgtcagtcgtactggaaataatgccaatgtcacagtaactgttacttatcaagatggaacaacatcaacagtgactgtacctgtaaagcatgtcattccagaaatcgttgcacattcgcattacactgtacaaggccaagacttcccagcaggtaatggttctagtgcatcagattactttaagttatctaatggtagtgacattgcagatgcaactattacatgggtaagtggacaagcgccaaataaagataatacacgtattggtgaagatataactgtaactgcacatatcttaattgatggcgaaacaacgccgattacgaaaacagcaacatataaagtagtaagaactgtaccgaaacatgtctttgaaacagccagaggtgttttatacccaggtgtttcagatatgtatgatgcgaaacaatatgttaagccagtaaataattcttggtcgacaaatgcgcaacatatgaatttccaatttgttggaacatatggtcctaacaaagatgttgtaggcatatctactcgtcttattagagtgacatatgataatagacaaacagaagatttaactattttatctaaagttaaacctgacccacctagaattgacgcaaactctgtgacatataaagcaggtcttacaaaccaagaaattaaagttaataacgtattaaataactcgtcagtaaaattatttaaagcagataatacaccattaaatgtcacaaatattactcatggtagcggttttagttcggttgtgacagtaagtgacgcgttaccaaatggcggaattaaagcaaaatcttcaatttcaatgaacaatgtgacgtatacgacgcaagacgaacatggtcaagttgttacagtaacaagaaatgaatctgttgattcaaatgacagtgcaacagtaacagtgacaccacaattacaagcaactactgaaggcgctgtatttattaaaggtggcgacggttttgatttcggacacgtagaaagatttattcaaaacccgccacatggggcaacggttgcatggcatgatagtccagatacatggaagaatacagtcggtaacactcataaaactgcggttgtaacattacctaatggtcaaggtacgcgtaatgttgaagttccagtcaaagtttatccagttgctaatgcaaaggcgccatcacgtgatgtgaaaggtcaaaatttgactaatggaacggatgcgatgaactacattacatttgatccaaatacaaacacaaatggtatcactgcagcatgggcaaatagacaacaaccaaataaccaacaagcaggcgtgcaacatttaaatgtcgatgtcacatatccaggtatttcagctgctaaacgagttcctgttactgttaatgtatatcaatttgaattccctcaaactacttatacgacaacggttggaggcactttagcaagtggtacgcaagcatcaggatatgcacatatgcaaaatgctactggtttaccaacagatggatttacgtataaatggaatcgtgatactacaggtacaaatgacgcaaactggtcagctatgaataaaccgaatgtggctaaagtcgttaacgcaaaatatgacgtcatctataacggacatacttttgcaacatctttaccagcgaaatttgtagtaaaagatgtgcaaccagcgaaaccaactgtgactgaaacagcggcaggagcgattacaattgcacctggagcaaaccaaacagtgaatacacatgccggtaacgtaacgacatacgctgataaattagttattaaacgtaatggtaacgttgtgacgacatttacacgtcgcaataatacgagtccatgggtgaaagaagcatctgcagcaactgtagcaggtattgctggaactaataatggtattactgttgcagcaggtactttcaaccctgctgatacaattcaagttgttgcaacgcaaggaagcggagagacagtgagtgatgagcaacgtagtgatgatttcacagttgtcgcaccacaaccgaaccaagcgactactaagatttggcaaaatggtcatattgatatcacgcctaataatccatcaggacatttaattaatccaactcaagcaatggatattgcttacactgaaaaagtgggtaatggtgcagaacatagtaagacaattaatgttgttcgtggtcaaaataatcaatggacaattgcgaataagcctgactatgtaacgttagatgcacaaactggtaaagtgacgttcaatgccaatactataaaaccaaattcatcaatcacaattactccgaaagcaggtacaggtcactcagtaagtagtaatccaagtacattaactgcaccggcagctcatactgtcaacacaactgaaattgtgaaagattatggttcaaatgtaacagcagctgaaattaacaatgcagttcaagttgctaataaacgtactgcaacgattaaaaatggcacagcaatgcctactaatttagctggtggtagcacaacgacgattcctgtgacagtaacttacaatgatggtagtactgaagaagtacaagagtccattttcacaaaagcggataaacgtgagttaatcacagctaaaaatcatttagatgatccagtaagcactgaaggtaaaaagccaggtacaattacgcagtacaataatgcaatgcataatgcgcaacaacaaatcaatactgcgaaaacagaagcacaacaagtgattaataatgagcgtgcaacaccacaacaagtttctgacgcactaactaaagttcgtgcagcacaaactaagattgatcaagctaaagcattacttcaaaataaagaagataatagccaattagtaacgtctaaaaataacttacaaagttctgtgaaccaagtaccatcaactgctggtatgacgcaacaaagtattgataactataatgcgaagaagcgtgaagcagaaactgaaataactgcagctcaacgtgttattgacaatggcgatgcaactgcacaacaaatttcagatgaaaaacatcgtgtcgataacgcattaacagcattaaaccaagcgaaacatgatttaactgcagatacacatgccttagagcaagcagtgcaacaattgaatcgcacaggtacaacgactggtaagaagccggcaagtattactgcttacaataattcgattcgtgcacttcaaagtgacttaacaagtgctaaaaatagcgctaatgctattattcaaaagccaataagaacagtacaagaagtgcaatctgcgttaacaaatgtaaatcgtgtcaatgagcgattaacgcaagcaattaatcaattagtacctttagctgataatagtgctttaaaaactgctaagacgaaacttgatgaagaaatcaataaatcagtaactactgatggtatgacacaatcatcaatccaagcatatgaaaatgctaaacgtgcgggtcaaacagaatcaacaaatgcacaaaatgttattaacaatggtgatgcgactgaccaacaaattgccgcagaaaaaacaaaagtagaagaaaaatataatagcttaaaacaagcaattgctggattaactccagacttggcaccattacaaactgcaaaaactcagttgcaaaatgatattgatcagccaacgagtacgactggtatgacaagcgcatctattgcagcatttaatgaaaaactttcagcagctagaactaaaattcaagaaattgatcgtgtattagcctcacatccagatgttgcgacaatacgtcaaaacgtgacagcagcgaatgccgctaaatcagcacttgatcaagcacgtaatggcttaacagtcgataaagcgcctttagaaaatgcgaaaaatcaactacaatatagtattgacacgcaaacaagtacaactggtatgacacaagactctataaatgcatacaatgcgaagttaacagctgcacgtaataagattcaacaaatcaatcaagtattagcaggttcaccgactgtagaacaaattaatacaaatacgtctacagcaaatcaagctaaatctgatttagatcatgcacgtcaagctttaacaccagataaagcgccgcttcaaactgcgaaaacgcaattagaacaaagcattaatcaaccaacggatacaacaggtatgacgaccgcttcgttaaatgcgtacaaccaaaaattacaagcagcgcgtcaaaagttaactgaaattaatcaagtgttgaatggcaacccaactgtccaaaatatcaatgataaagtgacagaggcaaaccaagctaaggatcaattaaatacagcacgtcaaggtttaacattagatagacagccagcgttaacaacattacatggtgcatctaacttaaaccaagcacaacaaaataatttcacgcaacaaattaatgctgctcaaaatcatgctgcgcttgaaacaattaagtctaacattacggctttaaatactgcgatgacgaaattaaaagacagtgttgcggataataatacaattaaatcagatcaaaattacactgacgcaacaccagctaataaacaagcgtatgataatgcagttaatgcggctaaaggtgtcattggagaaacgactaatccaacgatggatgttaacacagtgaaccaaaaagcagcatctgttaaatcgacgaaagatgctttagatggtcaacaaaacttacaacgtgcgaaaacagaagcaacaaatgcgattacgcatgcaagtgatttaaaccaagcacaaaagaatgcattaacacaacaagtgaatagtgcacaaaacgtgcaagcagtaaatgatattaaacaaacgactcaaagcttaaatactgctatgacaggtttaaaacgtggcgttgctaatcataaccaagtcgtacaaagtgataattatgtcaacgcagatactaataagaaaaatgattacaacaatgcatacaaccatgcgaatgacattattaatggtaatgcacaacatccagttataacaccaagtgatgttaacaatgctttatcaaatgtcacaagtaaagaacatgcattgaatggtgaagctaagttaaatgctgcgaaacaagaagcgaatactgcattaggtcatttaaacaatttaaataatgcacaacgtcaaaacttacaatcgcaaattaatggtgcgcatcaaattgatgcagttaatacaattaagcaaaatgcaacaaacttgaatagtgcaatgggtaacttaagacaagctgttgcagataaagatcaagtgaaacgtacagaagattatgcggatgcagatacagctaaacaaaatgcatataacagtgcagtttcaagtgccgaaacaatcattaatcaaacaacaaatccaacgatgtctgttgatgatgttaatcgtgcaacttcagctgttacttctaataaaaatgcattaaatggttatgaaaaattagcacaatctaaaacagatgctgcaagagcaattgatgcattaccacatttaaataatgcacaaaaagcagatgttaaatctaaaattaatgctgcatcaaatattgctggcgtaaatactgttaaacaacaaggtacagatttaaatacagcgatgggtaacttgcaaggtgcaatcaatgatgaacaaacgacgcttaatagtcaaaactatcaagatgcgacacctagtaagaaaacagcatacacaaatgcggtacaagctgcgaaagatattttaaataaatcaaatggtcaaaataaaacgaaagatcaagttactgaagcgatgaatcaagtgaattctgctaaaaataacttagatggtacgcgtttattagatcaagcgaagcaaacagcaaaacagcagttaaataatatgacgcatttaacaactgcacaaaaaacgaatttaacaaaccaaattaatagtggtactactgtcgctggtgttcaaacggttcaatcaaatgccaatacattagatcaagccatgaatacgttaagacaaagtattgccaacaaagatgcgactaaagcaagtgaagattacgtagatgctaataatgataagcaaacagcatataacaacgcagtagctgctgctgaaacgattattaatgctaatagtaatccagaaatgaatccaagtacgattacacaaaaagcagagcaagtgaatagttctaaaacggcacttaacggtgatgaaaacttagctgctgcaaaacaaaatgcgaaaacgtacttaaacacattgacaagtattacagatgctcaaaagaacaatttgattagtcaaattactagtgcgacaagagtgagtggtgttgatactgtaaaacaaaatgcgcaacatctagaccaagctatggctagcttacagaatggtattaacaacgaatctcaagtgaaatcatctgagaaatatcgtgatgctgatacaaataaacaacaagagtatgataatgctattactgcagcgaaagcgattttaaataaatcgacaggtccaaacactgcgcaaaatgcagttgaagcagcattacaacgtgttaataatgcgaaagatgcattgaatggtgatgcaaaattaattgcagctcaaaacgcagcgaaacaacatttaggtactttaacgcatatcactacagctcaacgtaatgatttaacaaatcaaatttcacaagctacaaacttagctggtgttgaatctgttaaacaaaatgcgaatagtttagatggtgctatgggtaacttacaaacggctatcaacgataagtcaggaacattagcgagccaaaacttcttggatgctgatgagcaaaaacgtaatgcatacaatcaagctgtatcagcagccgaaaccattttaaataaacaaactggaccgaatacagcgaaaacagcagtcgaacaagcacttaataatgttaataatgcgaaacatgcattaaatggtacgcaaaacttaaacaatgcgaaacaagcagcgattacagcaatcaatggcgcatctgatttaaatcaaaaacaaaaagatgcattaaaagcacaagctaatggtgctcaacgcgtatctaatgcacaagatgtacagcacaatgcgactgaactgaacacggcaatgggcacattaaaacatgccatcgcagataagacgaatacgttagcaagcagtaaatatgttaatgccgatagcactaaacaaaatgcttacacaactaaagttaccaatgctgaacatattattagcggtacgccaacggttgttacgacaccttcagaagtaacagctgcagctaatcaagtaaacagcgcgaaacaagaattaaatggtgacgaaagattacgtgaagcaaaacaaaacgccaatactgctattgatgcattaacacaattaaatacacctcaaaaagctaaattaaaagaacaagtgggacaagccaatagattagaagacgtacaaactgttcaaacaaatggacaagcattgaacaatgcaatgaaaggcttaagagatagtattgctaacgaaacaacagtcaaaacaagtcaaaactatacagacgcaagtccgaataaccaatcaacatataatagcgctgtgtcaaatgcgaaaggtatcattaatcaaactaacaatccgactatggatactagtgcgattacccaagctacaacacaagtgaataatgctaaaaatggtttaaacggtgctgaaaacttaagaaatgcacaaaacactgctaagcaaaacttaaatacattatcacacttaacaaataaccaaaaatctgccatctcatcacaaattgatcgtgcaggtcatgtgagtgaggtaactgctactaaaaatgcagcaactgagttgaatacgcaaatgggtaacttggaacaagctatccatgatcaaaacacagttaaacaaagtgttaaatttactgatgcagataaagctaaacgtgatgcgtatacaaatgcggtaagcagagctgaagcaattctgaataaaacgcaaggtgcaaatacgtctaaacaagatgttgaagcggctattcaaaatgtttcaagtgctaaaaatgcattgaatggtgatcaaaacgttacaaatgcgaagaatgcagctaaaaatgcattaaataacttaacgtcaattaataatgcacaaaaacgtgacttaacaactaaaattgatcaagcaacaactgtagctggtgttgaagctgtatctaatacgagtacacaattgaatacagcgatggctaacttgcaaaatggtattaatgataaaacaaatacactagcaagtgaaaactatcatgatgctgattcagataagaaaactgcttatactcaagccgttacgaacgcagaaaatattttaaataaaaatagtggatcaaatttagacaaaactgccgttgaaaacgcgttgtcacaagttgctaatgcgaaaggtgccctaaatggtaaccataatttagagcaagctaaatcaaatgcaaacactactataaacggacttcaacatttaacaactgctcaaaaagataaattgaaacaacaagtgcaacaagcacaaaatgttgcaggtgtagatactgttaaatcaagtgccaacacattaaatggtgctatgggtacgttaagaaatagcatacaagataacacagctacgaaaaatggccaaaactatcttgatgctacagaacgtaacaaaacaaactataacaatgctgttgatagtgctaatggtgtcattaatgcaacaagcaatccaaatatggatgctaatgcaattaaccaaatcgctacacaagtgacatcaacgaaaaatgcattagatggtacacataatttaacgcaagcgaaacaaacagcaacaaatgccatcgatggtgctactaacttaaataaagcgcaaaaagatgcgttaaaagcacaagttacaagtgcgcaacgtgttgcaaatgtaacaagtatccaacaaactgcaaatgaacttaatacagctatgggtcaattacaacatggtattgatgatgaaaatgcaacaaaacaaactcaaaaatatcgtgacgctgaacaaagtaagaaaactgcttatgatcaagctgtagctgctgcgaaagcaattttaaataaacaaacaggttcaaattcagataaagcagcagttgaccgtgcattacaacaagtaacaagtacgaaagatgcattgaatggtgatgcaaaactggcagaagcgaaagcggcagctaaacaaaacttaggcactttaaaccatattacgaatgcacaacgtactgacttagaaggccaaaacaatcaagcgacgactgttgatggcgttaatactgtaaaaacaaatgccaatacattagacggcgcaatgaatagcttacaaggttcaatcaatgataaagatgcgacattaagaaatcaaaattatcttgatgcggatgaatcaaaacgaaatgcatatacgcaagctgtcacagcggctgaaggcattttaaataaacaaactggtggtaacacatctaaagcagacgttgataatgcattaaatgcagttacaagagcgaaagcggctttaaatggtgctgacaacttaagaaatgcgaaaacttcagcaacaaatacgattgatggtttacctaacttaacacaattacaaaaagacaacttgaagcatcaagttgaacaagcgcaaaatgtagcaggtgtaaatggtgttaaagataaaggtaatacgttaaatactgccatgggtgcattacgtacaagtatccaaaatgataatacgacgaaaacaagtcaaaattatcttgatgcatctgacagcaacaaaaataattacaatactgctgtaaataatgcaaatggtgttattaatgcaacgaacaatccaaatatggatgctaatgcgattaatggcatggcaaatcaagtcaatacaacaaaagcagcgttaaatggtgcacaaaacttagctcaagctaaaacaaatgcgacgaacacaattaacaacgcacatgacttaaaccaaaaacaaaaagatgcattaaaaacacaagttaacaatgcacaacgtgtatctgatgcaaataacgttcaacacactgcaactgaattgaacagtgcgatgacagcacttaaagcagctattgctgataaagaaagaacaaaagcaagcggtaattatgtcaatgctgatcaagaaaaacgtcaagcgtatgattcaaaagtgactaacgctgaaaatatcattagtggtacaccgaatgcgacattaacagtcaatgacgtaaatagtgcggcatcacaagtcaatgcggctaaaacagcattaaatggtgataacaacttacgtgtagcgaaagagcatgccaacaatacaattgacggcttagcacaattgaataatgcacaaaaagcaaaattaaaagaacaagttcaaagtgcaactacattagatggtgttcaaactgttaaaaatagttctcaaacgttgaatacagcgatgaaaggcttaagagatagtattgcgaatgaagcaacaattaaagcaggtcaaaactacactgacgcaagtccaaataatcgtaacgagtacgacagtgcagttactgcagcaaaagcaatcattaatcaaacatcgaacccaacgatggaaccaaatactattacgcaagtaacatcacaagtgacaactaaagaacaggcattaaatggtgcgcgaaacttagctcaagctaagacaactgcgaaaaacaacttgaataacttaacatcaattaacaatgcacaaaaagatgcgttaacgcgtagcattgatggtgcaacaacagtagctggtgtaaatcaagaaactgcaaaagcaacagaattaaataacgcaatgcatagtttacaaaatggtatcaatgatgagacacaaacaaaacaaactcagaaatacctagatgcagagccaagtaagaaatcagcttatgatcaagcagtaaatgcagcgaaagcaattttaacaaaagctagtggtcaaaatgtagacaaagcagcagttgaacaagcattgcaaaatgtgaacagtacgaagacggcgttgaacggtgatgcgaaattaaatgaagctaaagcagctgcgaaacaaacgttaggtacattaacacacattaataatgcacaacgtacagcgttagacaatgaaattacacaagcaacaaatgttgaaggtgttaatacagttaaagccaaagcgcaacaattagatggtgctatgggtcaattagaaacatcaattcgtgataaagacacgacgttacaaagtcaaaattatcaagatgctgatgatgctaaacgaactgcttattctcaagcagtaaatgcagcagcaactattttaaataaaacagctggcggtaatacacctaaagcagatgttgaaagagcaatgcaagctgttacacaagcaaatactgcattaaacggtattcaaaacttagatcgtgcgaaacaggctgctaacacagcgattacaaatgcttcggacttaaatacaaaacaaaaagaagcattaaaagcacaagtaacaagtgcaggacgtgtatctgcagcaaatggtgttgaacatactgcgactgaattaaatactgcgatgacagctttaaagcgtgccattgctgataaagctgagacaaaagctagtggtaactatgtcaatgctgatgcgaataaacgtcaagcatatgatgaaaaagttacagctgccgaaaatatcgttagtggtacaccaacaccaacgttaacaccagcagatgttacaaatgcagcaacgcaagtaacgaatgctaagacgcagttaaacggtaatcataatttagaagtagcgaaacaaaatgctaacactgcaattgatggtttaacttctttaaatggtccgcaaaaagcaaaacttaaagaacaagtgggtcaagcgacgacgttgccaaatgttcaaactgttcgtgataatgcacaaacattaaacactgcaatgaaaggtctacgagatagcattgcgaatgaagcaacgattaaagcaggtcaaaactacacagatgcaagtcaaaacaaacaaactgactacaacagtgcagtcactgcagcaaaagcaatcattggtcaaacaactagtccatcaatgaatgcgcaagaaattaatcaagcgaaagaccaagtgacagctaaacaacaagcgttaaacggtcaagaaaacttaagaactgcgcaaacaaatgcgaagcaacatttgaacggcttaagtgacttaactgacgctcaaaaagatgcagtgaaacgtcaaatcgaaggtgcaacgcatgttaatgaagtaacacaagcacaaaataatgcggatgcattaaatacagctatgacgaacttgaaaaatggtattcaagatcagaatacgattaagcaaggtgttaacttcactgatgccgacgaagcgaaacgtaatgcatatacaaatgcagtgacgcaagctgaacaaattttaaataaagcacaaggtccaaatacttcaaaagacggtgtcgaaactgcgttagaaaatgtacaacgtgctaaaaacgaattgaacggtaatcaaaatgttgcgaacgctaagacaactgcgaaaaatgcattgaataacctaacatcaattaataatgcacaaaaagaagcattgaaatcacaaattgaaggtgcgacaacagttgcaggtgtaaatcaagtgtctacaacggcatctgaattaaatacagcaatgagcaacttacaaaatggtattaatgatgaagcagctacaaaagcagctcagaaatatactgatgcagatagagaaaaacaaactgcatacaatgacgctgtaacagcagctaaaacgttattagataaaacagctggttcaaatgacaataaagcagctgttgaacaagcattacaacgtgtgaatactgctaaaacagcattaaatggtgacgagcgattaaatgaagcgaagaacacagctaaacaacaagtagcgacaatgtcacacttaactgatgctcaaaaagcaaacttaacatcgcaaatcgaaagtggtacgactgttgcaggtgttcaaggtattcaagctaatgccggtactttagatcaagcaatgaatcaattaagacaaagtattgcttctaaagatgcgactaaatcaagcgaagattatcaagacgcgaatgcagatttacaaaatgcatacaatgatgcggtaactaatgctgaaggtattattagtgcaacgaataaccctgaaatgaatcctgatacaattaaccaaaaagcgagccaagtgaacagtgcgaagtctgcattgaacggtgatgaaaaattagcagcagcaaaacaaactgcgaaatcagatatcggtcgtttgacagacttgaacaatgcacaacgaactgcggcaaatgctgaagtggatcaagcaccaaatcttgcagctgtcacagcggctaaaaataaagcaacatcgttaaatacagcgatgggtaatttgaaacatgcacttgctgaaaaggataatacgaaacgtagtgtcaattacacagatgcggatcaaccaaaacaacaagcgtatgatactgcggttacacaagcagaagcaattactaatgctaatggcagcaacgcgaatgaaacacaagttcaagcagcactaaaccaattgaatcaagctaaaaatgacttgaatggtgataataaagttgctcaagcaaaagagtcagcgaaacgtgcattagcttcatatagtaacttgaataatgcgcaatcaactgcagcaactagtcaaattgacaatgcaacgacagtagcaggcgtaactgctgcacaaaatactgctaatgaattaaatacagcaatgggtcaacttcaaaatggtataaatgaccaaaacactgttaaacaacaagtgaactttacagatgctgaccaaggtaagaaagatgcttacacaaatgctgttacgaatgctcaaggtattttagataaagcacacggtcaaaatatgacgaaagcacaagttgaagctgcattaaatcaagtaacgactgctaagaatgctttaaacggtgacgcaaatgtaagacaagcaaaatcagatgcgaaagcaaacttaggtacattaacacacttaaataatgcacaaaaacaagatttaacatcacaaatcgaaggcgcaacaacagtcaacggtgtaaatggtgttaaaacgaaagcacaagacttagatggtgcaatgcaacgattacaatcagctatagcaaataaagatcaaactaaagcgagcgaaaattacatcgacgcagatccaactaagaaaacagcatttgataatgctatcacacaagctgaatcttacttaaataaagatcacggtgcgaataaagataagcaagctgttgaacaagcaattcaaagtgtaacgtctactgaaaatgctttgaacggtgacgcgaacttacaacgcgctaaaactgaagctatacaagctatcgataacttgacacatttgaatacaccacaaaaaacagcattaaaacaacaagtgaacgctgcgcaacgtgtatcaggtgtaactgatctgaaaaatagtgctacatcacttaataatgcgatggatcaattaaaacaagcaattgctgatcatgacacaattgtagctagtggtaattacactaacgcgagtcctgataagcaaggtgcttatactgatgcatataatgctgcgaaaaacattgtaaatggttcgcctaatgtgattacaaatgcagcagatgttacagcagcaacacaacgtgttaataatgctgaaacaggtttaaacggtgatacaaacttagcaactgcgaagcaacaagctaaagatgcattacgtcaaatgacacatttatctgatgcacaaaaacaaagtattactggtcaaattgatagcgcgacacaagtaactggcgttcaaagtgtgaaagacaacgcgacaaatcttgataatgcaatgaatcaacttcgaaatagtattgcgaataaagatgatgtaaaagcgagtcaaccatatgttgatgcagatagagataaacaaaatgcatacaatacagcagttacaaatgctgaaaatatcattaatgcaacgagtcagccgacacttgatccatctgcagtaacacaagcagctaatcaagtgagcactaacaaaactgcgcttaatggtgcacaaaacttagcgaataaaaagcaagaaacgactgctaacatcaaccaattaagtcatttaaataatgctcaaaagcaagatttaaatacgcaagtgacaaatgcaccaaatattagcacagtaaatcaagtgaaaactaaagctgaacaattagatcaagcaatggaacgtttaatcaacggaatccaagacaaagatcaagtgaaacaaagtgttaactttacagatgcagatccagaaaaacaaacagcatacaacaatgcggtaactgctgctgaaaatattattaatcaagcaaatggtacaaatgcgaaccaatcacaagttgaagcagcactttcaactgtaacaactacgaaacaagcgttgaatggtgatagaaaagtaacagatgctaaaaacaatgcaaaccaaacattatctacgttagataacttaaacaatgcacaaaaaggtgctgttactggaaacatcaatcaagcgcacactgtagctgaagtaacgcaagccattcaaaccgctcaggaactgaatacagcgatgggtaacttgaaaaatagcttgaatgataaagacactacacttggcagtcaaaactttgcagatgcagatccagagaagaaaaatgcatacaatgaagcggttcataatgctgaaaatattttaaataaatctacaggtacgaacgtgcctaaagatcaagttgaagcagctatgaatcaagtgaatgctacaaaagcagcgcttaatggtactcaaaaccttgaaaaagctaaacaacacgcaaatacagcaattgacggtttaagccatttaacaaatgcacaaaaagaggcattaaaacaattggtacaacaatcgactactgttgcagaagcacaaggtaatgagcaaaaagcaaacaatgttgatgcagcaatggacaaattacgtcaaagtattgcagataatgcgacaacaaaacaaaaccaaaattatactgatgcaagtcagaataaaaaggatgcgtacaataatgctgtcacaactgcacaaggtattattgatcaaactacaagtccaactttagatccgactgttatcaatcaagctgctggacaagtaagcacaactaaaaatgcattaaatggtaatgaaaacctagaggcagcgaaacaacaagcgtcacaatcattaggttcattagataacttaaataatgcgcaaaaacaaacagttactgatcaaattaatggcgcgcatactgttgatgaagcaaatcaaattaagcaaaatgcgcaaaacttaaatacagcgatgggtaacttgaaacaagcgatagctgacaaagatgctacgaaagcgacagttaacttcactgatgcagatcaagcaaaacaacaagcatataacactgctgttacaaatgctgaaaatatcatttcaaaagctaatggcggcaatgcaacacaagctgaagttgaacaagcaatcaaacaagttaatgctgcaaaacaagcattaaatggtaatgccaacgttcaacatgcaaaagacgaagcaacagcattaattaatagctctaatgaccttaaccaagcacaaaaagacgcattaaaacaacaagttcaaaatgcaactactgtagctggtgtaaacaatgttaaacaaacagcacaagagttaaacaatgctatgacacaattaaaacaaggcattgcagataaagaacaaacaaaagctgatggtaactttgtcaatgcagatcctgataagcaaaatgcatataatcaagcagtagcgaaagctgaagcattaattagtgctacgcctgatgttgtcgttacacctagcgaaattactgcagcgttaaataaagttacgcaagctaaaaatgatttaaatggtaatacaaacttagcaacggcgaaacaaaatgttcaacatgctattgatcaattgccaaacttaaaccaagcgcaacgtgatgaatacagcaaacaaatcacgcaagcaacacttgtaccaaacgtcaatgctattcaacaagcggcgacaacgcttaatgacgcgatgacacaattgaaacaaggtattgcgaataaagcacaaattaaaggtagcgagaactatcacgatgctgatactgacaagcaaacagcatatgataatgcagtaacaaaagcagaagaattgttaaaacaaacaacaaatccaacaatggatccaaatacaattcaacaagcattaactaaagtgaatgacacaaatcaagcacttaacggtaatcaaaaattagctgatgccaaacaagatgctaagacaacacttggtacactagatcatttaaatgatgctcaaaaacaagcgctaacaactcaagttgaacaagcaccagatattgcaacagttaataatgttaagcaaaatgctcaaaatctgaataatgctatgactaacttaaacaatgcattacaagataaaactgagacattaaatagcattaactttactgatgcagatcaagctaagaaagatgcttatactaatgcggtttcacatgcagaaggtattttatctaaagcaaatggcagcaatgcaagtcaaactgaagtggaacaagcgatgcaacgtgtgaacgaagcgaaacaagcattgaatggtaatgacaatgtacaacgtgcaaaagatgcagcgaaacaagtgattacaaatgcaaatgatttaaatcaagcgcaaaaagatgcattaaaacaacaagtcgatgctgcgcaaactgttgcaaatgtaaacacgattaagcaaacagcacaagatttaaatcaagcaatgacacaattgaaacaaggtattgcagataaagaccaaactaaagcaaatggtaactttgtcaatgctgatactgataagcaaaatgcttacaacaatgcggtagcacatgctgaacaaataattagtggtacaccaaatgcaaacgtggatccacaacaagtggctcaagcgttacaacaagtgaatcaagctaagggtgatttaaacggtaaccataacttacaagttgctaaagacaatgcaaatacagccattgatcagttaccaaacttaaatcaaccacaaaaaacagcattaaaagaccaagtgtcgcatgcagaacttgttacaggtgttaatgctattaagcaaaatgctgatgcgttaaataatgcaatgggtacattgaaacaacaaattcaagcgaacagtcaagtaccacagtcagttgactttacacaagcggatcaagacaaacaacaagcatataacaatgcggctaaccaagcgcaacaaatcgcaaatggcataccaacacctgtattgacgcctgatacagtaacacaagcagtgacaactatgaatcaagcgaaagatgcattaaacggtgatgaaaaattagcacaagcgaaacaagaagctttagcaaatcttgatacgttacgcgatttaaatcaaccacaacgtgatgcattacgtaaccaaatcaatcaagcacaagcgttagctacagttgaacaaactaaacaaaatgcacaaaatgtgaatacagcaatgagtaacttgaaacaaggtattgcaaacaaagatactgtcaaagcaagtgagaactatcatgatgctgatgccgataagcaaacagcatatacaaatgcagtgtctcaagcggaaggtattatcaatcaaacgacaaatccaacgcttaacccagatgaaataacacgtgcattaactcaagtgactgatgctaaaaatggcttaaacggtgaagctaaattggcaactgaaaagcaaaatgctaaagatgccgtaagtgggatgacgcatttaaacgatgctcaaaaacaagcattaaaaggtcaaatcgatcaatcgcctgaaattgctacagtgaaccaagttaaacaaacagcaacgagcctagatcaagcaatggatcaattatcacaagctattaatgataaagctcaaacattagcggacggtaattacttaaatgcagatcctgacaaacaaaatgcgtataaacaggcagtagcaaaagctgaagcattattgaataaacaaagtggtactaatgaagtacaagcacaagttgaaagcatcactaatgaagtgaacgcagcgaaacaagcattaaatggtaatgacaatttggcaaatgcaaaacaacaagcaaaacaacaattggcgaacttaacacacttaaatgatgcacaaaaacaatcatttgaaagtcaaattacacaagcgccacttgttacagatgtcactacgattaatcaaaaagcacaaacgttagatcatgcgatggaattattaagaaatagtgttgcggataatcaaacgacattagcgtctgaagattatcatgatgcaactgcgcaaagacaaaatgactataaccaagctgtaacagctgctaataatatcattaatcaaactacatcgcctacgatgaatccagatgatgttaatggtgcaacgacacaagtgaataatacgaaagttgcattagatggtgatgaaaaccttgcagcagctaaacaacaagcaaacaacagacttgatcaattagatcatttgaataatgcgcaaaagcaacagttacaatcacaaattacgcaatcatctgatattgctgcagttaatggtcacaaacaaacagcagaatctttaaatactgcgatgggtaacttaattaatgcgattgcagatcatcaagccgttgaacaacgtggtaacttcatcaatgctgatactgataaacaaactgcttataatacagcggtaaatgaagcagcagcaatgattaacaaacaaactggtcaaaatgcgaaccaaacagaagtagaacaagctattactaaagttcaaacaacacttcaagcgttaaatggagaccataatttacaagttgctaaaacaaatgcgacgcaagcaattgatgctttaacaagcttaaatgatcctcaaaaaacagcattaaaagaccaagttacagctgcaactttagtaactgcagttcatcaaattgaacaaaatgcgaatacgcttaaccaagcaatgcatggtttaagacagagcattcaagataacgcagcaactaaagcaaatagcaaatatatcaacgaagatcaaccagagcaacaaaactatgatcaagctgttcaagccgcaaataatattatcaatgaacaaactgcaacattagataataatgcgattaatcaagcagcgacaactgtgaatacaacgaaagcagcattacatggtgatgtgaagttacaaaatgataaagatcatgctaagcaaacggttagtcaattagcacatctaaacaatgcacaaaaacatatggaagatacgttaattgatagtgaaacaactagaacagcagttaagcaagatttgactgaagcacaagcattagatcaacttatggatgcattacaacaaagtattgctgacaaagatgcaacacgtgcgagcagtgcatatgtcaatgcagaaccgaataaaaaacaatcctatgatgaagcagttcaaaatgctgagtctatcattgcaggattaaataatccaactatcaataaaggtaatgtatcaagtgcgactcaagcagtaatatcatctaaaaatgcattagatggtgttgaacgattagctcaagataagcaaactgctggaaattctctaaatcatttagatcaattaacaccagctcaacaacaagcgctagaaaatcaaattaataatgcaacaactcgtggcgaagtagcacaaaaattaactgaagcacaagcacttaaccaagcaatggaagctttacgtaatagcattcaagatcaacagcaaacggaagcgggtagcaagtttatcaatgaagataaaccacaaaaagatgcttaccaagcagcagttcaaaatgcaaaagatttaattaatcaaactaacaatccaacgcttgataaagcacaagttgaacaattgacacaagctgttaaccaagctaaagataacctacacggtgatcaaaaacttgcagacgataaacaacatgcggttactgatttaaatcaattaaatggtttgaataatccgcaacgtcaagcacttgaaagccaaataaacaacgcagcaactcgtggcgaagtagcacaaaaattagctgaagcaaaagcgcttgatcaagcaatgcaagcattacgtaatagtattcaagatcaacaacaaacagaatctggtagcaagtttatcaatgaagataaaccgcaaaaagatgcttaccaagcagcagttcaaaatgcaaaagatttaattaaccaaacaggtaatccaacactcgacaaatcacaagtagaacaattgacacaagcagtaacaactgcaaaagataatctacatggtgatcaaaaacttgctcgtgatcaacaacaagcagtaacaactgtaaatgcattgccaaacttaaatcatgcacaacaacaagcattaactgatgctataaatgcagcgcctacaagaacagaggttgcacaacatgttcaaactgctactgaacttgatcacgcgatggaaacattgaaaaataaagttgatcaagtgaatacagataaggctcaaccaaattacactgaagcgtcaactgataaaaaagaagcagtagatcaagcgttacaagctgcagaaagcattacagatccaactaatggttcaaatgcgaataaagacgctgtagaccaagtattaactaagcttcaagaaaaagaaaatgagttaaatggtaatgagagagtcgctgaagctaaaacacaagcgaaacaaactattgaccaattaacacatttaaatgctgatcaaattgcaactgctaaacaaaacattgatcaagcgacgaaacttcaaccaattgctgaattagtagatcaagcaacgcaattgaatcaatctatggatcaattacaacaagcagttaatgaacatgctaacgttgagcaaactgtagattacacacaagcagattcagataaacaaaatgcttataaacaagctattgctgatgctgaaaatgtattgaaacaaaatgcgaataagcaacaagtggatcaagcacttcaaaatattttaaatgcaaaacaagcattaaatggtgatgaacgtgtagcacttgctaaaacaaatggtaaacatgacatcgaccaattgaatgcattaaacaatgctcaacaagatggatttaaaggtcgcatcgatcaatcaaacgatttaaatcaaatccaacaaattgtagatgaggctaaggcacttaatcgtgcaatggatcaattgtcacaagaaatcactgacaatgaaggacgcacgaaaggtagcacgaactatgtcaatgcagatacacaagtcaaacaagtatatgatgaaacggttgataaagcgaaacaagcacttgataaatcgactggtcaaaacttaactgcaaaacaagttatcaaattaaatgatgcagtcactgcagctaagaaagcattaaatggtgaagaaagacttaataatcgtaaagctgaagcattacaaagattggatcaattaacacatctaaacaatgctcaaagacaattagcaatccaacaaattaataatgctgaaacgctaaataaagcatctcgagcaattaatagagcaactaaattagataatgcaatgggtgcagtacaacaatatattgacgaacagcaccttggtgttatcagcagcacaaattacatcaatgcagatgacaatttgaaagcaaattatgataatgcaattgcgaatgcagcacatgagttagataaagtgcaaggtaatgcaattgcaaaagctgaagcagagcaattgaaacaaaatattatcgatgctcaaaatgcattaaatggagaccaaaaccttgcaaatgccaaagataaagcaaatgcgtttgttaattcgttaaatggattaaatcaacagcaacaagatcttgcacataaagcaattaacaatgccgatactgtatcagatgtaacagatattgttaataatcaaattgacttaaatgatgcaatggaaacattgaaacatttagttgacaatgaaattccaaatgcagagcaaactgtcaattaccaaaacgctgacgataatgctaaaacaaacttcgatgatgccaaacgtctagcaaatacattgctaaatagtgataacacaaatgtgaatgatatcaatggcgcaatccaagcagtcaatgatgcaatccataatcttaatggtgatcaacgactacaagatgctaaagacaaggcaattcaatctattaatcaagctttagctaataagctaaaagaaatcgaagcttcaaatgcgacggatcaagacaagcttattgcgaaaaataaagcagaagaattggcaaacagcatcatcaacaacattaataaagcaacaagtaatcaggctgtatctcaagttcaaacagcaggcaaccacgcgattgaacaagtgcatgccaatgaaataccaaaagcaaaaattgatgccaataaagacgttgataagcaagttcaagcattaattgacgaaattgatcgaaatccaaatctaacagataaggaaaaacaagcacttaaagatcgtattaatcaaatacttcaacaaggtcataacggcattaacaatgcgatgactaaagaagaaattgaacaagccaaagcacaacttgcgcaagcattacaagacatcaaagatttagtgaaagctaaagaagatgcgaaacaagatgttgataaacaagttcaagctttaattgacgaaatcgatcaaaatccaaatctaacagataaggaaaaacaagcacttaaagatcgtattaatcaaatacttcaacaaggtcatarcgacattamcaatgcgatgacaaaagaagcaattgaacaagcaaaagaacgtttagcgcaagcattgcaagacatcaaagatttagtgaaagctaaagaagatgcgaaaaatgatattgataaacgtgtacaagctttaattgacgaaatcgatcaaaatccaaatctaacagataaggaaaaacaagcacttaaagatcgaattaatcaaatacttcaacaaggtcataacgacattaacaatgcgctgactaaagaagaaattgagcaggcaaaagcacaacttgcacaagcattgcaagacatcaaagatttagtgaaagctaaagaagatgcgaaaaatgcaataaaagccttagctaatgcgaagcgtgatcaaatcaattcaaatccagatttaacacctgagcaaaaagcaaaagcgctcaaagaaattgacgaagctgaaaaacgagcactacaaaacgttgagaatgctcaaactatagatcaattaaatcgaggattaaacttaggtttagatgacattagaaatacacatgtatgggaggttgatgaacaacctgctgtaaatgaaatttttgaagcaacacctgagcaaatcctagttaatggtgaactcattgtacatcgtgatgacatcattacagaacaagatattcttgcacacataaacttaattgatcagctttcagcagaagtcatcgatacaccatcaactgcaacgatttctgatagcttaacagcaaaagttgaagttacattgcttgatggatcaaaagtgattgttaatgttcctgtaaaagttgtagaaaaagaattgtcagtagtcaaacaacaggcaattgaatcaatcgaaaatgcggcacaacaaaagattaatgaaatcaataatagtgtgacattaacactggaacaaaaagaagctgcaattgcagaagttaataagcttaaacaacaagcaattgatcatgttaacaatgcacctgatgttcattcagttgaagaaattcaacaacaagaacaagcgcatattgaacaatttaatccagaacaatttacgattgaacaagcaaaatcaaatgcaattaaatcgattgaagatgcaattcaacatatgattgatgaaatcaaagctcgtactgatctaacagataaagagaagcaagaagctattgctaagttaaatcaattaaaagaacaagcaattcaagcgattcaacgtgcgcaaagcatcgatgaaataagtgagcaattggaacaatttaaagctcaaatgaaagcagctaatccaacagcaaaagaactagctaaacgcaagcaagaagctattagtagaattaaagacttttcaaatgaaaaaataaatagtattcgaaatagtgaaattggcacagctgatgaaaaacaagcagcaatgaatcaaattaacgaaattgtgcttgaaacaattagagatattaataatgcgcatacattacagcaagttgaggctgcattgaacaatggtattgctcgaatttcagcagtacaaattgtaacatctgatcgtgctaaacaatcgtcaagtactggaaatgaatctaatagccatttaacaattggttatggaactgcaaatcatccatttaacagttcgactattggacataaaaagaaacttgatgaagatgatgacattgatccacttcatatgcgtcactttagtaataatttcggtaatgttattaaaaacgctattggtgtggtgggtatctctggtttactagctagtttctggttcttcattgccaaacgtcgtcgtaaagaagatgaagaggaagaattagaaataagagataataataaagattcaataaaagagactttagacgatacaaaacatttaccacttttatttgcgaaacgtcgcagaaaagaagatgaagaagatgttactgttgaagaaaaagattcgctaaataatggcgagtcactcgataaagttaaacatacgccgttcttcttaccaaaacgtcgtcgtaaagaagatgaagaagatgtggaagttacaaatgaaaacacagatgaaaaagtgttgaaagataacgaacattcaccactcttattcgcaaaacgacgcaaagataaagaggaagatgttgaaacaacaactagtattgaatctaaagatgaggacgttcctttattattggctaaaaagaaaaatcaaaaagataaccaatccaaagacaaaaagtcagcatcaaaaaatacttctaaaaaggtagcagctaaaaagaagaaaaagaaagctaagaaaaataaaaaataa

SEQ ID NO: 440 - protein, 10498 aa, Staphylococcus aureus
  MOD_RES (9728)..(9731): X = anything
VNYRDKIQKFSIRKYTVGTFSTVIATLVFLGFNTSQAHAAETNQPASVVKQKQQSNNEQTENRESQVQNSQNSQNGQSLSATHENEQPNISQANLVDQKVAQSSTTNDEQPASQNVNTKKDSATAATTQPDKEQSKHKQNESQSANKNGNDNRAAHVENHEANVVTASDSSDNGNVQHDRNELQAFFDANYHDYRFIDRENADSGTFNYVKGIFDKINTLLGSNDPINNKDLQLAYKELEQAVALIRTMPQRQQTSRRSNRIQTRSVESRAAEPRSVSDYQNANSSYYVENANDGSGYPVGTYINASSKGAPYNLPTTPWNTLKASDSKEIALMTAKQTGDGYQWVIKFNKGHAPHQNMIFWFALPADQVPVGRTDFVTVNSDGTNVQWSHGAGAGANKPLQQMWEYGVNDPHRSHDFKIRNRSGQVIYDWPTVHIYSLEDLSRASDYFSEAGATPATKAFGRQNFEYINGQKPAESPGVPKVYTFIGQGDASYTISFKTQGPTVNKLYYAAGGRALEYNQLFMYSQLYVESTQDHQQRLNGLRQVVNRTYRIGTTKRVEVSQGNVQTKKVLESTNLNIDDFVDDPLSYVKTPSNKVLGFYSNNANTNAFRPGGAQQLNEYQLSQLFTDQKLQEAARTRNPIRLMIGFDYPDAYGNSETLVPVNLTVLPEIQHNIKFFKNDDTQNIAEKPFSKQAGHPVFYVYAGNQGNASVNLGGSVTSIQPLRINLTSNENFTDKDWQITGIPRTLHIENSTNRPNNARERNIELVGNLLPGDYFGTIRFGRKEQLFEIRVKPHTPTITTTAEQLRGTALQKVPVNISGIPLDPSALVYLVAPTNQTTNGGSEADQIPSGYTILATGTPDGVHNTITIRPQDYVVFIPPVGKQIRAVVYYNKVVASNMSNAVTILPDDIPPTINNPVGINAKYYRGDEVNFTMGVSDRHSGIKNTTITTLPNGWTSNLTKADKNNGSLSITGRVSMNQAFNSDITFKVSATDNVNNTTNDSQSKHVSIHVGKISEDAHPIVLGNTEKVVVVNPTAVSNDEKQSIITAFMNKNQNIRGYLASTDPVTVDNNGNVTLHYRDGSSTTLDATNVMTYEPVVKPEYQTVNAAKTATVTIAKGQSFSIGDIKQYFTLSNGQPIPSGTFTNITSDRTIPTAQEVSQMNAGTQLYHITATNAYHKDSEDFYISLKIIDVKQPEGDQRVYRTSTYDLTTDEISKVKQAFINANRDVITLAEGDISVTNTPNGANVSTITVNINKGRLTKSFASNLANMNFLRWVNFPQDYTVTWTNAKIANRPTDGGLSWSDDHKSLIYRYDATLGTQITTNDILTMLKATTTVPGLRNNITGNEKSQAEAGGRPNFRTTGYSQSNATTDGQRQFTLNGQVIQVLDIINPSNGYGGQPVTNSNTRANHSNSTVVNVNEPAANGAGAFTIDHVVKSNSTHNASDAVYKAQLYLTPYGPKQYVEHLNQNTGNTTDAINIYFVPSDLVNPTISVGNYTNHQVFSGETFTNTITANDNFGVQSVTVPNTSQITGTVDNNHQHVSATAPNVTSATNKTINLLATDTSGNTATTSFNVTVKPLRDKYRVGTSSTAANPVRIANISNNATVSQADQTTIINSLTFTETVPNRSYARASANEITSKTVSNVSRTGNNANVTVTVTYQDGTTSTVTVPVKHVIPEIVAHSHYTVQGQDFPAGNGSSASDYFKLSNGSDIADATITWVSGQAPNKDNTRIGEDITVTAHILIDGETTPITKTATYKVVRTVPKHVFETARGVLYPGVSDMYDAKQYVKPVNNSWSTNAQHMNFQFVGTYGPNKDVVGISTRLIRVTYDNRQTEDLTILSKVKPDPPRIDANSVTYKAGLTNQEIKVNNVLNNSSVKLFKADNTPLNVTNITHGSGFSSVVTVSDALPNGGIKAKSSISMNNVTYTTQDEHGQVVTVTRNESVDSNDSATVTVTPQLQATTEGAVFIKGGDGFDFGHVERFIQNPPHGATVAWHDSPDTWKNTVGNTHKTAVVTLPNGQGTRNVEVPVKVYPVANAKAPSRDVKGQNLTNGTDAMNYITFDPNTNTNGITAAWANRQQPNNQQAGVQHLNVDVTYPGISAAKRVPVTVNVYQFEFPQTTYTTTVGGTLASGTQASGYAHMQNATGLPTDGFTYKWNRDTTGTNDANWSAMNKPNVAKVVNAKYDVIYNGHTFATSLPAKFVVKDVQPAKPTVTETAAGAITIAPGANQTVNTHAGNVTTYADKLVIKRNGNVVTTFTRRNNTSPWVKEASAATVAGIAGTNNGITVAAGTFNPADTIQVVATQGSGETVSDEQRSDDFTVVAPQPNQATTKIWQNGHIDITPNNPSGHLINPTQAMDIAYTEKVGNGAEHSKTINVVRGQNNQWTIANKPDYVTLDAQTGKVTFNANTIKPNSSITITPKAGTGHSVSSNPSTLTAPAAHTVNTTEIVKDYGSNVTAAEINNAVQVANKRTATIKNGTAMPTNLAGGSTTTIPVTVTYNDGSTEEVQESIFTKADKRELITAKNHLDDPVSTEGKKPGTITQYNNAMHNAQQQINTAKTEAQQVINNERATPQQVSDALTKVRAAQTKIDQAKALLQNKEDNSQLVTSKNNLQSSVNQVPSTAGMTQQSIDNYNAKKREAETEITAAQRVIDNGDATAQQISDEKHRVDNALTALNQAKHDLTADTHALEQAVQQLNRTGTTTGKKPASITAYNNSIRALQSDLTSAKNSANAIIQKPIRTVQEVQSALTNVNRVNERLTQAINQLVPLADNSALKTAKTKLDEEINKSVTTDGMTQSSIQAYENAKRAGQTESTNAQNVINNGDATDQQIAAEKTKVEEKYNSLKQAIAGLTPDLAPLQTAKTQLQNDIDQPTSTTGMTSASIAAFNEKLSAARTKIQEIDRVLASHPDVATIRQNVTAANAAKSALDQARNGLTVDKAPLENAKNQLQYSIDTQTSTTGMTQDSINAYNAKLTAARNKIQQINQVLAGSPTVEQINTNTSTANQAKSDLDHARQALTPDKAPLQTAKTQLEQSINQPTDTTGMTTASLNAYNQKLQAARQKLTEINQVLNGNPTVQNINDKVTEANQAKDQLNTARQGLTLDRQPALTTLHGASNLNQAQQNNFTQQINAAQNHAALETIKSNITALNTAMTKLKDSVADNNTIKSDQNYTDATPANKQAYDNAVNAAKGVIGETTNPTMDVNTVNQKAASVKSTKDALDGQQNLQRAKTEATNAITHASDLNQAQKNALTQQVNSAQNVQAVNDIKQTTQSLNTAMTGLKRGVANHNQVVQSDNYVNADTNKKNDYNNAYNHANDIINGNAQHPVITPSDVNNALSNVTSKEHALNGEAKLNAAKQEANTALGHLNNLNNAQRQNLQSQINGAHQIDAVNTIKQNATNLNSAMGNLRQAVADKDQVKRTEDYADADTAKQNAYNSAVSSAETIINQTTNPTMSVDDVNRATSAVTSNKNALNGYEKLAQSKTDAARAIDALPHLNNAQKADVKSKINAASNIAGVNTVKQQGTDLNTAMGNLQGAINDEQTTLNSQNYQDATPSKKTAYTNAVQAAKDILNKSNGQNKTKDQVTEAMNQVNSAKNNLDGTRLLDQAKQTAKQQLNNMTHLTTAQKTNLTNQINSGTTVAGVQTVQSNANTLDQAMNTLRQSIANKDATKASEDYVDANNDKQTAYNNAVAAAETIINANSNPEMNPSTITQKAEQVNSSKTALNGDENLAAAKQNAKTYLNTLTSITDAQKNNLISQITSATRVSGVDTVKQNAQHLDQAMASLQNGINNESQVKSSEKYRDADTNKQQEYDNAITAAKAILNKSTGPNTAQNAVEAALQRVNNAKDALNGDAKLIAAQNAAKQHLGTLTHITTAQRNDLTNQISQATNLAGVESVKQNANSLDGAMGNLQTAINDKSGTLASQNFLDADEQKRNAYNQAVSAAETILNKQTGPNTAKTAVEQALNNVNNAKHALNGTQNLNNAKQAAITAINGASDLNQKQKDALKAQANGAQRVSNAQDVQHNATELNTAMGTLKHAIADKTNTLASSKYVNADSTKQNAYTTKVTNAEHIISGTPTVVTTPSEVTAAANQVNSAKQELNGDERLREAKQNANTAIDALTQLNTPQKAKLKEQVGQANRLEDVQTVQTNGQALNNAMKGLRDSIANETTVKTSQNYTDASPNNQSTYNSAVSNAKGIINQTNNPTMDTSAITQATTQVNNAKNGLNGAENLRNAQNTAKQNLNTLSHLTNNQKSAISSQIDRAGHVSEVTATKNAATELNTQMGNLEQAIHDQNTVKQSVKFTDADKAKRDAYTNAVSRAEAILNKTQGANTSKQDVEAAIQNVSSAKNALNGDQNVTNAKNAAKNALNNLTSINNAQKRDLTTKIDQATTVAGVEAVSNTSTQLNTAMANLQNGINDKTNTLASENYHDADSDKKTAYTQAVTNAENILNKNSGSNLDKTAVENALSQVANAKGALNGNHNLEQAKSNANTTINGLQHLTTAQKDKLKQQVQQAQNVAGVDTVKSSANTLNGAMGTLRNSIQDNTATKNGQNYLDATERNKTNYNNAVDSANGVINATSNPNMDANAINQIATQVTSTKNALDGTHNLTQAKQTATNAIDGATNLNKAQKDALKAQVTSAQRVANVTSIQQTANELNTAMGQLQHGIDDENATKQTQKYRDAEQSKKTAYDQAVAAAKAILNKQTGSNSDKAAVDRALQQVTSTKDALNGDAKLAEAKAAAKQNLGTLNHITNAQRTDLEGQNNQATTVDGVNTVKTNANTLDGAMNSLQGSINDKDATLRNQNYLDADESKRNAYTQAVTAAEGILNKQTGGNTSKADVDNALNAVTRAKAALNGADNLRNAKTSATNTIDGLPNLTQLQKDNLKHQVEQAQNVAGVNGVKDKGNTLNTAMGALRTSIQNDNTTKTSQNYLDASDSNKNNYNTAVNNANGVINATNNPNMDANAINGMANQVNTTKAALNGAQNLAQAKTNATNTINNAHDLNQKQKDALKTQVNNAQRVSDANNVQHTATELNSAMTALKAAIADKERTKASGNYVNADQEKRQAYDSKVTNAENIISGTPNATLTVNDVNSAASQVNAAKTALNGDNNLRVAKEHANNTIDGLAQLNNAQKAKLKEQVQSATTLDGVQTVKNSSQTLNTAMKGLRDSIANEATIKAGQNYTDASPNNRNEYDSAVTAAKAIINQTSNPTMEPNTITQVTSQVTTKEQALNGARNLAQAKTTAKNNLNNLTSINNAQKDALTRSIDGATTVAGVNQETAKATELNNAMHSLQNGINDETQTKQTQKYLDAEPSKKSAYDQAVNAAKAILTKASGQNVDKAAVEQALQNVNSTKTALNGDAKLNEAKAAAKQTLGTLTHINNAQRTALDNEITQATNVEGVNTVKAKAQQLDGAMGQLETSIRDKDTTLQSQNYQDADDAKRTAYSQAVNAAATILNKTAGGNTPKADVERAMQAVTQANTALNGIQNLDRAKQAANTAITNASDLNTKQKEALKAQVTSAGRVSAANGVEHTATELNTAMTALKRAIADKAETKASGNYVNADANKRQAYDEKVTAAENIVSGTPTPTLTPADVTNAATQVTNAKTQLNGNHNLEVAKQNANTAIDGLTSLNGPQKAKLKEQVGQATTLPNVQTVRDNAQTLNTAMKGLRDSIANEATIKAGQNYTDASQNKQTDYNSAVTAAKAIIGQTTSPSMNAQEINQAKDQVTAKQQALNGQENLRTAQTNAKQHLNGLSDLTDAQKDAVKRQIEGATHVNEVTQAQNNADALNTAMTNLKNGIQDQNTIKQGVNFTDADEAKRNAYTNAVTQAEQILNKAQGPNTSKDGVETALENVQRAKNELNGNQNVANAKTTAKNALNNLTSINNAQKEALKSQIEGATTVAGVNQVSTTASELNTAMSNLQNGINDEAATKAAQKYTDADREKQTAYNDAVTAAKTLLDKTAGSNDNKAAVEQALQRVNTAKTALNGDERLNEAKNTAKQQVATMSHLTDAQKANLTSQIESGTTVAGVQGIQANAGTLDQAMNQLRQSIASKDATKSSEDYQDANADLQNAYNDAVTNAEGIISATNNPEMNPDTINQKASQVNSAKSALNGDEKLAAAKQTAKSDIGRLTDLNNAQRTAANAEVDQAPNLAAVTAAKNKATSLNTAMGNLKHALAEKDNTKRSVNYTDADQPKQQAYDTAVTQAEAITNANGSNANETQVQAALNQLNQAKNDLNGDNKVAQAKESAKRALASYSNLNNAQSTAATSQIDNATTVAGVTAAQNTANELNTAMGQLQNGINDQNTVKQQVNFTDADQGKKDAYTNAVTNAQGILDKAHGQNMTKAQVEAALNQVTTAKNALNGDANVRQAKSDAKANLGTLTHLNNAQKQDLTSQIEGATTVNGVNGVKTKAQDLDGAMQRLQSAIANKDQTKASENYIDADPTKKTAFDNAITQAESYLNKDHGANKDKQAVEQAIQSVTSTENALNGDANLQRAKTEAIQAIDNLTHLNTPQKTALKQQVNAAQRVSGVTDLKNSATSLNNAMDQLKQAIADHDTIVASGNYTNASPDKQGAYTDAYNAAKNIVNGSPNVITNAADVTAATQRVNNAETGLNGDTNLATAKQQAKDALRQMTHLSDAQKQSITGQIDSATQVTGVQSVKDNATNLDNAMNQLRNSIANKDDVKASQPYVDADRDKQNAYNTAVTNAENIINATSQPTLDPSAVTQAANQVSTNKTALNGAQNLANKKQETTANINQLSHLNNAQKQDLNTQVTNAPNISTVNQVKTKAEQLDQAMERLINGIQDKDQVKQSVNFTDADPEKQTAYNNAVTAAENIINQANGTNANQSQVEAALSTVTTTKQALNGDRKVTDAKNNANQTLSTLDNLNNAQKGAVTGNINQAHTVAEVTQAIQTAQELNTAMGNLKNSLNDKDTTLGSQNFADADPEKKNAYNEAVHNAENILNKSTGTNVPKDQVEAAMNQVNATKAALNGTQNLEKAKQHANTAIDGLSHLTNAQKEALKQLVQQSTTVAEAQGNEQKANNVDAAMDKLRQSIADNATTKQNQNYTDASQNKKDAYNNAVTTAQGIIDQTTSPTLDPTVINQAAGQVSTTKNALNGNENLEAAKQQASQSLGSLDNLNNAQKQTVTDQINGAHTVDEANQIKQNAQNLNTAMGNLKQAIADKDATKATVNFTDADQAKQQAYNTAVTNAENIISKANGGNATQAEVEQAIKQVNAAKQALNGNANVQHAKDEATALINSSNDLNQAQKDALKQQVQNATTVAGVNNVKQTAQELNNAMTQLKQGIADKEQTKADGNFVNADPDKQNAYNQAVAKAEALISATPDVVVTPSEITAALNKVTQAKNDLNGNTNLATAKQNVQHAIDQLPNLNQAQRDEYSKQITQATLVPNVNAIQQAATTLNDAMTQLKQGIANKAQIKGSENYHDADTDKQTAYDNAVTKAEELLKQTTNPTMDPNTIQQALTKVNDTNQALNGNQKLADAKQDAKTTLGTLDHLNDAQKQALTTQVEQAPDIATVNNVKQNAQNLNNAMTNLNNALQDKTETLNSINFTDADQAKKDAYTNAVSHAEGILSKANGSNASQTEVEQAMQRVNEAKQALNGNDNVQRAKDAAKQVITNANDLNQAQKDALKQQVDAAQTVANVNTIKQTAQDLNQAMTQLKQGIADKDQTKANGNFVNADTDKQNAYNNAVAHAEQIISGTPNANVDPQQVAQALQQVNQAKGDLNGNHNLQVAKDNANTAIDQLPNLNQPQKTALKDQVSHAELVTGVNAIKQNADALNNAMGTLKQQIQANSQVPQSVDFTQADQDKQQAYNNAANQAQQIANGIPTPVLTPDTVTQAVTTMNQAKDALNGDEKLAQAKQEALANLDTLRDLNQPQRDALRNQINQAQALATVEQTKQNAQNVNTAMSNLKQGIANKDTVKASENYHDADADKQTAYTNAVSQAEGIINQTTNPTLNPDEITRALTQVTDAKNGLNGEAKLATEKQNAKDAVSGMTHLNDAQKQALKGQIDQSPEIATVNQVKQTATSLDQAMDQLSQAINDKAQTLADGNYLNADPDKQNAYKQAVAKAEALLNKQSGTNEVQAQVESITNEVNAAKQALNGNDNLANAKQQAKQQLANLTHLNDAQKQSFESQITQAPLVTDVTTINQKAQTLDHAMELLRNSVADNQTTLASEDYHDATAQRQNDYNQAVTAANNIINQTTSPTMNPDDVNGATTQVNNTKVALDGDENLAAAKQQANNRLDQLDHLNNAQKQQLQSQITQSSDIAAVNGHKQTAESLNTAMGNLINAIADHQAVEQRGNFINADTDKQTAYNTAVNEAAAMINKQTGQNANQTEVEQAITKVQTTLQALNGDHNLQVAKTNATQAIDALTSLNDPQKTALKDQVTAATLVTAVHQIEQNANTLNQAMHGLRQSIQDNAATKANSKYINEDQPEQQNYDQAVQAANNIINEQTATLDNNAINQAATTVNTTKAALHGDVKLQNDKDHAKQTVSQLAHLNNAQKHMEDTLIDSETTRTAVKQDLTEAQALDQLMDALQQSIADKDATRASSAYVNAEPNKKQSYDEAVQNAESIIAGLNNPTINKGNVSSATQAVISSKNALDGVERLAQDKQTAGNSLNHLDQLTPAQQQALENQINNATTRGEVAQKLTEAQALNQAMEALRNSIQDQQQTEAGSKFINEDKPQKDAYQAAVQNAKDLINQTNNPTLDKAQVEQLTQAVNQAKDNLHGDQKLADDKQHAVTDLNQLNGLNNPQRQALESQINNAATRGEVAQKLAEAKALDQAMQALRNSIQDQQQTESGSKFINEDKPQKDAYQAAVQNAKDLINQTGNPTLDKSQVEQLTQAVTTAKDNLHGDQKLARDQQQAVTTVNALPNLNHAQQQALTDAINAAPTRTEVAQHVQTATELDHAMETLKNKVDQVNTDKAQPNYTEASTDKKEAVDQALQAAESITDPTNGSNANKDAVDQVLTKLQEKENELNGNERVAEAKTQAKQTIDQLTHLNADQIATAKQNIDQATKLQPIAELVDQATQLNQSMDQLQQAVNEHANVEQTVDYTQADSDKQNAYKQAIADAENVLKQNANKQQVDQALQNILNAKQALNGDERVALAKTNGKHDIDQLNALNNAQQDGFKGRIDQSNDLNQIQQIVDEAKALNRAMDQLSQEITDNEGRTKGSTNYVNADTQVKQVYDETVDKAKQALDKSTGQNLTAKQVIKLNDAVTAAKKALNGEERLNNRKAEALQRLDQLTHLNNAQRQLAIQQINNAETLNKASRAINRATKLDNAMGAVQQYIDEQHLGVISSTNYINADDNLKANYDNAIANAAHELDKVQGNAIAKAEAEQLKQNIIDAQNALNGDQNLANAKDKANAFVNSLNGLNQQQQDLAHKAINNADTVSDVTDIVNNQIDLNDAMETLKHLVDNEIPNAEQTVNYQNADDNAKTNFDDAKRLANTLLNSDNTNVNDINGAIQAVNDAIHNLNGDQRLQDAKDKAIQSINQALANKLKEIEASNATDQDKLIAKNKAEELANSIINNINKATSNQAVSQVQTAGNHAIEQVHANEIPKAKIDANKDVDKQVQALIDEIDRNPNLTDKEKQALKDRINQILQQGHNGINNAMTKEEIEQAKAQLAQALQDIKDLVKAKEDAKQDVDKQVQALIDEIDQNPNLTDKEKQALKDRINQILQQGHXDIXNAMTKEAIEQAKERLAQALQDIKDLVKAKEDAKNDIDKRVQALIDEIDQNPNLTDKEKQALKDRINQILQQGHNDINNALTKEEIEQAKAQLAQALQDIKDLVKAKEDAKNAIKALANAKRDQINSNPDLTPEQKAKALKEIDEAEKRALQNVENAQTIDQLNRGLNLGLDDIRNTHVWEVDEQPAVNEIFEATPEQILVNGELIVHRDDIITEQDILAHINLIDQLSAEVIDTPSTATISDSLTAKVEVTLLDGSKVIVNVPVKVVEKELSVVKQQAIESIENAAQQKINEINNSVTLTLEQKEAAIAEVNKLKQQAIDHVNNAPDVHSVEEIQQQEQAHIEQFNPEQFTIEQAKSNAIKSIEDAIQHMIDEIKARTDLTDKEKQEAIAKLNQLKEQAIQAIQRAQSIDEISEQLEQFKAQMKAANPTAKELAKRKQEAISRIKDFSNEKINSIRNSEIGTADEKQAAMNQINEIVLETIRDINNAHTLQQVEAALNNGIARISAVQIVTSDRAKQSSSTGNESNSHLTIGYGTANHPFNSSTIGHKKKLDEDDDIDPLHMRHFSNNFGNVIKNAIGVVGISGLLASFWFFIAKRRRKEDEEEELEIRDNNKDSIKETLDDTKHLPLLFAKRRRKEDEEDVTVEEKDSLNNGESLDKVKHTPFFLPKRRRKEDEEDVEVTNENTDEKVLKDNEHSPLLFAKRRKDKEEDVETTTSIESKDEDVPLLLAKKKNQKDNQSKDKKSASKNTSKKVAAKKKKKKAKKNKK

SEQ ID NO: 441 - DNA, 2523 bp, Staphylococcus epidermidis
atgttctttgatgatgctaaagaagcatcaagagtacttgaaataacattgacgaaaagagatgctaaaaaagaaaatcctattccgatgtgtggcgtaccatatcattctgctgataattacattgaaacattgattaataaggggtataaggtcgctatatgtgaacaaatggaagatccaaagcaaacaaaaggaatggttagaagagaagttgtaagaatcatcacaccaggaactgttatggatcaaaatggtatggatgaaaagaaaaataattatattttaagttttatcgaaaatgaagaatttggattatgctattgtgatgtttctacaggagaactcaaagtaactcatttcaaagatacagcaaccttgcttaatgagattacaacaattaatcccaatgaaatcgtcataaagcaagctctatctgaagaattaaaaagacaaatcaacatgataactgagacgattactgttcgcgaagatatatctgatgaagattatgatatgaatcagttgacacatcagttaatgcatgacacaactcaattattgttagattacattcatcacacacaaaagcgagatttatctcatattgaggaagtaattgaatatgctgcagttgattatatgaagatggattattatgcgaagcgaaatttagagctgacagagagcatacgattaaaatcaaaaaaagggactttgttatggttaatggatgagacaaaaacaccgatgggtgctagacgtttaaagcagtggattgatcgtccattaattaataaacaacaaatcaacgacagattaaatattgttgaagagtttatggaccgttttattgaaagagatacattacgtaatcatttaaatcaagtgtatgacatagaacgactagtaggaagagtgagttatggaaacgtaaatgcaagagatttaatacaacttaagcattctatatccgaaatacctcacattaaagcattactcaatgaattgggtgcacaaactaccacgcaatttaaagaattagaacctttagatgacttgttacaaattttagaagaaagtttagttgaagaaccacctatttccatcaaagatggaggattatttaaaaatggcttcaacgcgcaacttgatgaatatttagaagcttcaaaaaatggtaaaacttggcttgcagaattacaagctaaggaacgtgaacgtacaggtattaagtcattgaaaattagttttaataaagtgtttggttattttattgaaattacacgtgcaaacttaaataattttcaacctgaagcgtttggctataatcgaaaacaaacattatctaatgctgaacgatttattacggatgaattaaaagaaaaagaagatataatacttggtgctgaagataaagcagtagagttagaatatgaattatttgttaaattacgagaacacattaaaacgtacactgaacgtttacaaaagcaagcgaaaatcatttcagaacttgattgtttacaaagttttgctgaaattgctcaaaaatataattatgtcaaacctacatttagtgatgataaagttttacatttagaaaactcaagacatcctgttgttgagagagtgatggattataatgattatgtacctaatgattgccatcttgatgatgaaacgtttatttatctcattacgggacctaatatgtcaggtaagtcaacatatatgagacaagttgctataataagtatcatggctcaaatgggagcatatgtaccatgtgattcagcaacattacctatatttgatcaaatttttactaggattggtgcagcagatgatcttgtatcaggtaaaagtacatttatggtagaaatgttagaagctcaaaaagctttaacttatgctactgaaaatagtttaattatctttgacgaaataggaagaggtacatccacttatgatggtcttgcgttagcgcaagcgatgattgaatatgttgctcaaacttcccatgctaagacacttttctcaacacattatcatgaattgacatcacttgatcaaatgcttaagtgtttaaaaaatgtacatgttgctgcaaacgagtatcaaggtgaactgatatttttgcataaagtcaaagatggcgctgtggatgatagctatggtattcaagtggcaaaattagcggatttacctaatgaagtcattgatagagcgcaagttatattaaatgcatttgagcaaaaaccttcgtatcaactctctcatgagaatactgacaatcaacaaacggttccgtcgtataacgattttggtcgaacagaagaagagcaatcagttatagaaacacatacatcaaatcataattatgagcaagcgacctttgatttatttgatggttacaatcaacaaagtgaagttgaatgtcaaattcgagaattgaatctatccaatatgacaccattggaagccttaatcaagctgaatgaattacaaagtcaattaaag

SEQ ID NO: 442 - protein, 841 aa, Staphylococcus epidermidis
MFFDDAKEASRVLEITLTKRDAKKENPIPMCGVPYHSADNYIETLINKGYKVAICEQMEDPKQTKGMVRREVVRIITPGTVMDQNGMDEKKNNYILSFIENEEFGLCYCDVSTGELKVTHFKDTATLLNEITTINPNEIVIKQALSEELKRQINMITETITVREDISDEDYDMNQLTHQLMHDTTQLLLDYIHHTQKRDLSHIEEVIEYAAVDYMKMDYYAKRNLELTESIRLKSKKGTLLWLMDETKTPMGARRLKQWIDRPLINKQQINDRLNIVEEFMDRFIERDTLRNHLNQVYDIERLVGRVSYGNVNARDLIQLKHSISEIPHIKALLNELGAQTTTQFKELEPLDDLLQILEESLVEEPPISIKDGGLFKNGFNAQLDEYLEASKNGKTWLAELQAKERERTGIKSLKISFNKVFGYFIEITRANLNNFQPEAFGYNRKQTLSNAERFITDELKEKEDIILGAEDKAVELEYELFVKLREHIKTYTERLQKQAKIISELDCLQSFAEIAQKYNYVKPTFSDDKVLHLENSRHPVVERVMDYNDYVPNDCHLDDETFIYLITGPNMSGKSTYMRQVAIISIMAQMGAYVPCDSATLPIFDQIFTRIGAADDLVSGKSTFMVEMLEAQKALTYATENSLIIFDEIGRGTSTYDGLALAQAMIEYVAQTSHAKTLFSTHYHELTSLDQMLKCLKNVHVAANEYQGELIFLHKVKDGAVDDSYGIQVAKLADLPNEVIDRAQVILNAFEQKPSYQLSHENTDNQQTVPSYNDFGRTEEEQSVIETHTSNHNYEQATFDLFDGYNQQSEVECQIRELNLSNMTPLEALIKLNELQSQLK

SEQ ID NO: 443 - DNA, 3654 bp, Staphylococcus epidermidis
atgattccaactaaacctcatgatgtgatttggacagatgcacaatggcaaagtatttatgcgaaaggacaggacatacttgttgctgctgcagcaggttccggtaaaacagccgttctagttgagcgtattatacaacgtatactaagagatgatgtagatgtagatcggttactagttgtaacatttacgaatttaagcgcacgtgagatgaagcatcgagttgataaacgtatacaagaagcatcttttaaggatcctaacaatgaacatttaaagaatcagcgaatcaaaattcatcaagcacagatttctactttacacagtttctgtttgaaattgattcagcagcattatgatgtattagatatcgatcctcattttagaacaagtagtgaagcggaaaatatattattattagaacaaactattgatgatgttttagaacaacactatgataaattagatcctcactttatagaattaaccgaacaactatcatcagataggaatgatgatcaatttagaagtattattaagcagttatattttttcagtattgctaatcctcaaccatttgaatggctcaatcaattagcgcaaccatacaaagaagaaaataaacagcaacaattaatgcagcttatcaatgatttagcaatgatttttatgaaagcaggatatgaggaattacaaaaaagttatgacttattctcaatgatggaaagtgttgataagcagcttgaagttattgaaaccgaacgcatgtttattactaaagctattgaaggtaaagtattaaatacagatgttatcacgcaacatgaatttatgagtcgttttccggcaataaatagcaagataaaagaagcaaatgaaggcatggaagatgctttaaatgaagcaaaacaacattatgataaatataaatctttagttatgaaagtaaagaatgattatttttctagaaatgcagaagatttgcaaagagatatgcaacaactcgcacctcgagtggcttatttagctcaaatagttcaagatgtgattcaatcatttggtgttcaaaaacgaagtcgtaatattttggatttttcagattatgaacattttgcattacgcattcttactaacgaagatggctcaccttcgcgtatcgctgaaacgtatcgtgaacattttaaagaaatcctagttgatgagtatcaagatactaatagagtgcaagaaaaaatattatcttgtattaaaactggtgaagaacacgatggtaacttgttcatggttggggatgtgaagcagtctatttataaatttagacaagctgatcctagtttatttattgaaaaatataatcgcttttctagtagtggaaatgaaagtggcttgcgcattgacttatcgcaaaactttcgttcgagacaggaagtgttatctacaaccaattacttgttcaaacatatgatggatgaacaagtaggagaaatttcatatgatgatgcagcgcaattgtattttggtgcaccatatgacgaagtttcacatcctgttcaattacgagcacttgttgaggcaagttcagaaaatagtgacttaactggaagtgaacaagaagcgaattacattgttgaacaagttaaagatattattaatcatcaaaacgtatacgatatgaaaacaggtcaatacagaaaagcaacatataaagatatcgtaattttagagcgaagttttggtcaagcgcgtaatcttcaacaagcttttaaaaataatgatatcccttttcacgtaaatagtaaggaagggtattttgagcaaactgaagtacgtcttgtgctttcatttttaagaacaatagataatccacttcaagacatttatttagtgggattgatgcgttctgtaatatatcaatttactgaagaagaattagctgaaataagagttgtaagccctcatgatgattacttttatcaatctataaaaaattatatgattgatgaaaaagctgattctagattggttgacaagttaaatcgttttattcaggatatacaaaaatatcaaaattatagtcaaagtcaaccggtttaccaattaattgataaattttataatgatcattttgtaattcagtactttagcggtcttattggaggtaaaggtagaagagcaaatctgtatgggctatttaataaagctgttgaatttgaaaattcaagtttcagaggtttattccaatttattcgttttattgatgagcttattgatcgtaaaaaagattttggtgaagaaaatgtcgtaggtcctaacgataatgtggttagaatgatgacgattcacagtagtaaaggattagaatttccatttgtaatttactcaggattatctaaaaaattcaacaaaggtgacctgaatgcaccagttattctaaatcaacaatatggtttaggtatggattattttgatgtaaataaagatatggcttttccttcacttgcctctgtggcatatagagcaataaatgaaaaagaacttatatcagaagagatgcgtttaatctatgttgcgttgacacgagcaaaagagcaacttattttagttggaagagtcaaagatgaaaagtcgttaattaaatatgaacaattagctgtttcagacacacatatagcagttaatgaacgccttactgctaccaatccatttgttctaatttatggtgttttggctaagcatcaatcgccttcattgccaaatgatcaaagatttgaaagagatattgatcaattaaattctgaagtgaagccacgtgtatcaatagtgattgatcattatgaggatgtttcaactgaagaagtagtcaatgataatgaaataagaacaatcgaagaattaaaggccataaatactggtaatgaagatgtgaaaattaaaattcatcaacagctttcttatgactatccttttaaagttaacacgatgaaaccatctaaacagtcggtatcagagttaaaacgtcaattagaaactgaagaaagtaatacaaattatgatagagtacgtcaatatcgtattggtgttgcatcatatgaaagacccaagtttcttacccaaacaaaaaaaagaaaagcaaatgaaatagggactttaatgcatacagtcatgcaacacttaccttttagagaacaacgtttaacaaaagacgaattatttcaatatatcgatcgattgattgacaaacaacttattgatgaagatgcaaaagaggatattagaatagatgagattatgcatttcattgatggccctctctatatggaaatagctcaagctgacaatgtttatactgaattaccttttgtggtaaatcaaattaaagttgatggacttacaagtgaagatgaagatgtatccattattcaaggtatgattgatttaatatatgaaagtgacggacaattttactttgttgattacaaaacagatgcttttaatagaagaaaaggtatgagtgatgaagaaatagggaatcagctcaaagaaaaatatcagatacaaatgacgtattatcgaaatactttagaaaccatacttaaacgacccgtaaagggttacttatattttttcaaatttggtacattagaaatagatgat

SEQ ID NO: 444 - protein, 1218 aa, Staphylococcus epidermidis
MIPTKPHDVIWTDAQWQSIYAKGQDILVAAAAGSGKTAVLVERIIQRILRDDVDVDRLLVVTFTNLSAREMKHRVDKRIQEASFKDPNNEHLKNQRIKIHQAQISTLHSFCLKLIQQHYDVLDIDPHFRTSSEAENILLLEQTIDDVLEQHYDKLDPHFIELTEQLSSDRNDDQFRSIIKQLYFFSIANPQPFEWLNQLAQPYKEENKQQQLMQLINDLAMIFMKAGYEELQKSYDLFSMMESVDKQLEVIETERMFITKAIEGKVLNTDVITQHEFMSRFPAINSKIKEANEGMEDALNEAKQHYDKYKSLVMKVKNDYFSRNAEDLQRDMQQLAPRVAYLAQIVQDVIQSFGVQKRSRNILDFSDYEHFALRILTNEDGSPSRIAETYREHFKEILVDEYQDTNRVQEKILSCIKTGEEHDGNLFMVGDVKQSIYKFRQADPSLFIEKYNRFSSSGNESGLRIDLSQNFRSRQEVLSTTNYLFKHMMDEQVGEISYDDAAQLYFGAPYDEVSHPVQLRALVEASSENSDLTGSEQEANYIVEQVKDIINHQNVYDMKTGQYRKATYKDIVILERSFGQARNLQQAFKNNDIPFHVNSKEGYFEQTEVRLVLSFLRTIDNPLQDIYLVGLMRSVIYQFTEEELAEIRVVSPHDDYFYQSIKNYMIDEKADSRLVDKLNRFIQDIQKYQNYSQSQPVYQLIDKFYNDHFVIQYFSGLIGGKGRRANLYGLFNKAVEFENSSFRGLFQFIRFIDELIDRKKDFGEENVVGPNDNVVRMMTIHSSKGLEFPFVIYSGLSKKFNKGDLNAPVILNQQYGLGMDYFDVNKDMAFPSLASVAYRAINEKELISEEMRLIYVALTRAKEQLILVGRVKDEKSLIKYEQLAVSDTHIAVNERLTATNPFVLIYGVLAKHQSPSLPNDQRFERDIDQLNSEVKPRVSIVIDHYEDVSTEEVVNDNEIRTIEELKAINTGNEDVKIKIHQQLSYDYPFKVNTMKPSKQSVSELKRQLETEESNTNYDRVRQYRIGVASYERPKFLTQTKKRKANEIGTLMHTVMQHLPFREQRLTKDELFQYIDRLIDKQLIDEDAKEDIRIDEIMHFIDGPLYMEIAQADNVYTELPFVVNQIKVDGLTSEDEDVSIIQGMIDLIYESDGQFYFVDYKTDAFNRRKGMSDEEIGNQLKEKYQIQMTYYRNTLETILKRPVKGYLYFFKFGTLEIDD

SEQ ID NO: 445 - DNA, 213 bp, Staphylococcus epidermidis
ctgtaccatcaaatggtgctacaatttctcctgaatctggtacaaatccgataccatcacccatcatcttttcagagaaaactttatcaggtacttcagataacggtattatctcaccatgtccaggtgcgtaaatttctgtttctacaatatcttccacatgtacaggatcatctgacacttcttcatcaattgttgtttcacttggttttg

SEQ ID NO: 446 - protein, 71 aa, Staphylococcus epidermidis
LYHQMVLQFLLNLVQIRYHHPSSFQRKLYQVLQITVLSHHVQVRKFLFLQYLPHVQDHLTLLHQLLFHLVL

SEQ ID NO: 447 - DNA, 204 bp, Staphylococcus epidermidis
cgcatactttggtcatcactatgcgtaatccacaaaatggcaatccctttatctgctagtttaaatataatttcttcaattttctttttattatgtgtatctaaagcgctagtagcttcgtccaataataaaacttcaggttcatacatgagttgtctagcgatggtaatacgttgttgctctcccccagacatgtgctcaatt

SEQ ID NO: 448 - protein, 68 aa, Staphylococcus epidermidis
RILWSSLCVIHKMAIPLSASLNIISSIFFLLCVSKALVASSNNKTSGSYMSCLAMVIRCCSPPDMCSI

SEQ ID NO: 449 - DNA, 327 bp, Staphylococcus epidermidis
tcacgtactttacgcgctctactcttaatactccaaacaggcatgatgtgtggtttgttatggtcatcatctgaaatcataataaaattcttttcacctttgtttgtcaatccgtatacttcgtcatattttgcgacatctttaataaactctctcattcttatatcatctaattcagacatcaactcatcagtcattttaactatatctacaatgtttccttcttcaccattattcacattaactaaaactttgtcacctggatcaaagatttcatccatttcatatgttacaaaacggtcaatatctgctctaatgattttgtcg

SEQ ID NO: 450 - protein, 109 aa, Staphylococcus epidermidis
SRTLRALLLILQTGMMCGLLWSSSEIIIKFFSPLFVNPYTSSYFATSLINSLILISSNSDINSSVILTISTMFPSSPLFTLTKTLSPGSKISSISYVTKRSISALMILS

SEQ ID NO: 451 - DNA, 141 bp, Staphylococcus epidermidis
gcaggatttttgactaaagcagtacttaaatcaacttcatctctgtcatcaaacacttcttctacgacttctttacgtgcaatcactctaaatgaaccttcgtccatatttaattctactcttacatttctggcactatca

SEQ ID NO: 452 - protein, 47 aa, Staphylococcus epidermidis
AGFLTKAVLKSTSSLSSNTSSTTSLRAITLNEPSSIFNSTLTFLALS

SEQ ID NO: 453 - DNA, 180 bp, Staphylococcus epidermidis
tatttctttataagctttttaattagactaatatcatgctcattgattaccgaaacaatttcgatttgtccatttttagatataattgagccattaccaccaatcaaggtatcatccgcaaattcaggaatgactggaagcaagtctctaatgggacgtgctgatgcaaacattacattg

SEQ ID NO: 454 - protein, 60 aa, Staphylococcus epidermidis
YFFISFLIRLISCSLITETISICPFLDIIEPLPPIKVSSANSGMTGSKSLMGRADANITL

SEQ ID NO: 455 - DNA, 282 bp, Staphylococcus epidermidis
ttatcttcttctaaagctttaccttcaacgtcaacgtttggcaatactgcacctaaccatttaggaaggtaccatgaagctttaccaaagagtttcgtcaatgctggaattaatgtcatacgtacgacgaatgcgtcgaataacacaccgaaacctaatgcgatacccattgacttaattgcactgtcatcttggaagacgaatgcgatgaatacactgaacataataagtgcagcagctacgataacaggtccactttctttgatacctacacggattgaa

SEQ ID NO: 456 - protein, 94 aa, Staphylococcus epidermidis
LSSSKALPSTSTFGNTAPNHLGRYHEALPKSFVNAGINVIRTTNASNNTPKPNAIPIDLIALSSWKTNAMNTLNIISAAATITGPLSLIPTRIE

SEQ ID NO: 457 - DNA, 303 bp, Staphylococcus epidermidis
tcatcaactgcttgcattaagtctaagattttttgttcgtattcagcatcgccttctaatgcttttaatgcagaaccagcgattacaggtacatcgtcacctgggaagtcatattcgcttaataagtcacgaacttccatttcaactaattctaataattcttcgtcgtctaccatgtcaactttgtttaagaatacaactaatgctggtacaccaacgttacgtgataataagatgtgttcacgagtttgtggcattggaccgtcagcagcagatacaactaagataccgccgtccatttga

SEQ ID NO: 458 - protein, 100 aa, Staphylococcus epidermidis
SSTACIKSKIFCSYSASPSNAFNAEPAITGTSSPGKSYSLNKSRTSISTNSNNSSSSTMSTLFKNTTNAGTPTLRDNKMCSRVCGIGPSAADTTKIPPSI

SEQ ID NO: 459 - DNA, 120 bp, Staphylococcus epidermidis
ttagaaccacctacacgacgagctttaacttctaatactggcatgatattattaattgcttcttcgaacacttctaatgcatcacgaccactacgttgttcaacaagatcaaatgcagaa

SEQ ID NO: 460 - protein, 40 aa, Staphylococcus epidermidis
LEPPTRRALTSNTGMILLIASSNTSNASRPLRCSTRSNAE

SEQ ID NO: 461 - DNA, 84 bp, Staphylococcus epidermidis
aggaggcgaccgccccagtcaaactgcccgcctgacactgtctcccaccacgataagtggtgcgggttagaaagccaacacagc

SEQ ID NO: 462 - protein, 28 aa, Staphylococcus epidermidis
RRRPPQSNCPPDTVSHHDKWCGLESQHS

SEQ ID NO: 463 - DNA, 186 bp, Staphylococcus aureus
tgtgctattattccccctattgaaggacctaacccttcacctaaagctacaattgatcctataaaaccaaaggctttgccttgtttttttcttgtaatatttctagctacaaccaccataatcagtgaagggaatgcagcagatcctactccttgtactaacctaccaaaaatcaaaataaaaaag

SEQ ID NO: 464 - DNA, 210 bp, Staphylococcus aureus
gccagtcacttctcgttccatttgattcaatacaaacaaattatcttgaacatcttccgaagcactgtcgccagtatcttgcttttcttttgcttgttgtttatgatttattttcgcacggtcaaattttttcttaactttctcattattaatgatttttgcttttacatggcattcaaccggaaaaggcatattttgagctttctcaaa

SEQ ID NO: 465 - DNA, 501 bp, Staphylococcus aureus
tgtcgtattaatactgccttcaccagtattgctagcatttggatcttgagtttgtgcgtttgctgctacaggtgctgctggttgcgctgctgctggagcattcgctggctgtgtttgatttgccggtgttgcattattattaggtgttgcttggttatttccttgacctgcttggtttgccggtgttgcttgatttccaggttgtgcttgtgcagcgttattcggatcagcttgattaccttgtccagctggttgtgtatttggttgtgctgctcctcctgctggattagcctgtccaccttggtttgctggttgtactgctggttgtccttggttggcaggtgcagctggctgtgctgtaggattagcttgagcaccagcatttgcgttaggctgtgtattggcatcagctggttgtgctggttgattttgtgcaggctgattttgctctgctgcagacgctgttgtcgggttagtagatataaaagtaacagtggcaat

SEQ ID NO: 466 - DNA, 159 bp, Staphylococcus aureus
atccaacgtttcaggaataaatgttttcaaaccactttgaaatggatcgcggtgttgtgcttgatatactttgtagcgataacgtttacctacacaatcataacgacaatgaaaatcgtcatcgactgtaactacattgttgacataaatatcatcagg

SEQ ID NO: 467 - DNA, 126 bp, Staphylococcus aureus
cggtataaaggtaaagcaaaatgcatcagcttgcttagaatgattgtcctttttttgataatagcgttccattgcaatgacggcagaaggatggtttgcaaacaaatgatttgtatattcactttc

SEQ ID NO: 468 - DNA, 567 bp, Staphylococcus aureus; identical to SEQ ID NO: 171

SEQ ID NO: 469 - DNA, 60 bp, Staphylococcus aureus
atgctaactactttcgctgttgtactcattttcttcttacttccatcttcatttttattg

SEQ ID NO: 470 - DNA, 78 bp, Staphylococcus aureus
ttgagcatctgcatcattattatcattcatgcgatcatttttgttcacattattaaaaatggcattcaaaataacaat

SEQ ID NO: 471 - DNA, 123 bp, Staphylococcus aureus
ttgcctataccaagtactagaagtgcaccaataattccagcaatcaatgcaacgatgactgttttaaaccatggaaatttaggtcttctgtatctaggtgtttggctatggtttgttgtagaa

SEQ ID NO: 472 - DNA, 117 bp, Staphylococcus aureus
atgcttttgagttacttcataatactcatcagttttttgtgtatccttttgacttttatttatttctttccacttaccagtatgactttctttttttacagttattttcggtttgtt

SEQ ID NO: 473 - DNA, 96 bp, Staphylococcus aureus
atgacttgtgaaaaactggaaaatttcttgaccagtagcaaagccggcaccaacgacaacaccaacaaaggcaaatgccacaataatggactcttt

SEQ ID NO: 474 - DNA, 135 bp, Staphylococcus aureus
ttgattgtcattagtaacgttattgccattattttgatttttatctgttttgtctgcactatcatcttgttgatcattttcttcggtttctgtctttttatgcgtagatttattttcttgttcttggttattact

SEQ ID NO: 475 - DNA, 63 bp, Staphylococcus aureus
atgtgcagaaattgcccagcattcaccagttgtttcattagggatatcatagttaaatgcttt

SEQ ID NO: 476 - DNA, 102 bp, Staphylococcus aureus
gtggtatacaacgcaacgtatatgcatcttgtacacgtatttctgattgtcgcgtcgttaatgttgatccttctaaccaatcacgcatacgcgctgccacat

SEQ ID NO: 477 - DNA, 72 bp, Staphylococcus aureus
gtgacaaatatcacactaaacagtgcatttgcagatgctacgataagcgtatttttataccaagtcaggtat

SEQ ID NO: 478 - DNA, 138 bp, Staphylococcus aureus
ttgtgcagtagtagcttggttactattcttaagcttttgttctgcatctctcaactgtttaagtttttgatacgcatcttgtttacgttgatttgtacgtttatattgattttcagcttttttaagttctgtattcga

SEQ ID NO: 479 - DNA, 147 bp, Staphylococcus aureus
ttgccttcttgtttatattgttcaacaagtgctttatgcttagcggactgcttctgtactgcgtcacttgctctttttagttgtgcagtagtagcttggttactattcttaagcttttgttctgcatctctcaactgtttaagtttt

SEQ ID NO: 480 - protein, 62 aa, Staphylococcus aureus
CAIIPPIEGPNPSPKATIDPIKPKALPCFFLVIFLATTTIISEGNAADPTPCTNLPKIKIKK

SEQ ID NO: 481 - protein, 70 aa, Staphylococcus aureus
ASHFSFHLIQYKQIILNIFRSTVASILLFFCLLFMIYFRTVKFFLNFLIINDFCFYMAFNRKRHILSFLK

SEQ ID NO: 482 - protein, 167 aa, Staphylococcus aureus
CRINTAFTSIASIWILSLCVCCYRCCWLRCCWSIRWLCLICRCCIIIRCCLVISLTCLVCRCCLISRLCLCSVIRISLITLSSWLCIWLCCSSCWISLSTLVCWLYCWLSLVGRCSWLCCRISLSTSICVRLCIGISWLCWLILCRLILLCCRRCCRVSRYKSNSGN

SEQ ID NO: 483 - protein, 53 aa, Staphylococcus aureus
IQRFRNKCFQTTLKWIAVLCLIYFVAITFTYTIITTMKIVIDCNYIVDINIIR

SEQ ID NO: 484 - protein, 42 aa, Staphylococcus aureus
RYKGKAKCISLLRMIVLFLIIAFHCNDGRRMVCKQMICIFTF

SEQ ID NO: 485 - protein, 189 aa, Staphylococcus aureus; identical to SEQ ID NO: 172

SEQ ID NO: 486 - protein, 20 aa, Staphylococcus aureus
MLTTFAVVLIFFLLPSSFLL

SEQ ID NO: 487 - protein, 26 aa, Staphylococcus aureus
LSICIIIIIHAIIFVHIIKNGIQNNN

SEQ ID NO: 488 - protein, 41 aa, Staphylococcus aureus
LPIPSTRSAPIIPAINATMTVLNHGNLGLLYLGVWLWFVVE

SEQ ID NO: 489 - protein, 39 aa, Staphylococcus aureus
MLLSYFIILISFLCILLTFIYFFPLTSMTFFFYSYFRFV

SEQ ID NO: 490 - protein, 32 aa, Staphylococcus aureus
MTCEKLENFLTSSKAGTNDNTNKGKCHNNGLF

SEQ ID NO: 491 - protein, 45 aa, Staphylococcus aureus
LIVISNVIAIILIFICFVCTIILLIIFFGFCLFMRRFIFLFLVIT

SEQ ID NO: 492 - protein, 21 aa, Staphylococcus aureus
MCRNCPAFTSCFIRDIIVKCF

SEQ ID NO: 493 - protein, 34 aa, Staphylococcus aureus
VVYNATYMHLVHVFLIVASLMLILLTNHAYALPH

SEQ ID NO: 494 - protein, 24 aa, Staphylococcus aureus
VTNITLNSAFADATISVFLYQVRY

SEQ ID NO: 495 - protein, 46 aa, Staphylococcus aureus
LCSSSLVTILKLLFCISQLFKFLIRILFTLICTFILIFSFFKFCIR

SEQ ID NO: 496 - protein, 49 aa, Staphylococcus aureus
LPSCLYCSTSALCLADCFCTASLALFSCAVVAWLLFLSFCSASLNCLSF

SEQ ID NO: 497 - DNA, 165 bp, Staphylococcus epidermidis
caagtgctgaaaatgcttcagaacatcctcttgctgatgctattgttacttatgctaaagataaaggtcttaatttacttgataatgacacttttaaatcaattccgggacatggtattaaagctacgattcatcaacaacaaatccttgtgggcaatcgaaaat

SEQ ID NO: 498 - DNA, 156 bp, Staphylococcus epidermidis
aagaggcttgttatgcagcaacacctgcaattcaacttgccaaagattatcttgctcaacgccctaacgaaaaggttcttgtcattgctagtgacacagctcgttatggtattcattctggtggtgagcctactcaaggtgccggtgcagttgcaa

SEQ ID NO: 499 - DNA, 96 bp, Staphylococcus epidermidis
ctgcgcctacgccagtttcagctattatgcacgctggtattgttaatgctggtggcgttattcttacacgcttttctccggtatttaatgacgaaa

SEQ ID NO: 500 - DNA, 87 bp, Staphylococcus epidermidis
cgtttacgatatacttcatacatcattaaacttgcagccacagacgcgttcaagctattgacatgtccaaccattggaatcttaata

SEQ ID NO: 501 - DNA, 210 bp, Staphylococcus epidermidis
tcaagcgtttttgctatacgacttactatcactttttctcgattttcaaatgttggatgcaaaaaacatatcaagggagccataataatgaagaaagaaataatagaatggattgtagccataatcgttgcaattgttatcgtcacacttgtgcaaaagtttttatttgcttcttatacagtcaaaggagcatctaatgtcatttatcac

SEQ ID NO: 502 - DNA, 93 bp, Staphylococcus epidermidis
agatctgtaccacatattgtcgtcttaactatgcgaataatagcgtcagtactgctcgtaatagttggcttctctttatccgtaagttgtgca

SEQ ID NO: 503 - DNA, 291 bp, Staphylococcus epidermidis
actgccaataatatcatcagcttcataattacgcttaccaacatttacaaaaccaaactgatgggatatttctttaacataatcgaattgaggaataagttcatcaggaggtgctgggcgattttgtttatagccatcatacatttcatttctgaatgtttcttgccccatatcccaacaaactgctacgtgagtaggttcgatttccttgatagcgctaaaaatatgtcttacaaaaccttgaataccatttgtaggaattcctttagaattgtacataaattgattgtg

SEQ ID NO: 504 - DNA, 111 bp, Staphylococcus epidermidis
ttcttttgtagattgactcaactcaactggctcaaatacttgtccgttagaatgctttacatgtattttatgattttcagtataatgaatcatattgtaagtaccatttgt

SEQ ID NO: 505 - DNA, 93 bp, Staphylococcus epidermidis
atttttatatctacatgcgggtgtagtacaacatcagcttggaaggctgaggttttgccattaagggttcgattcccatcacccgctccattt

SEQ ID NO: 506 - DNA, 132 bp, Staphylococcus epidermidis
ctaaagaatatattgaggattgtatttattgctggtttgacagttttcttctctggtcctggccaaacttattcaaacgcagcatttattgatgaatatattcaaacatttggatggagccgtacagaagtt

SEQ ID NO: 507 - DNA, 155 bp, Staphylococcus epidermidis
aggaattccaatcaaatgtaccaaacatttacagcggatattgtacttatatttatgattattgtacttggaggacttgtagttcaagttccaatgccaattttagcaggtattatggttatggtttctgagacaatctactgtttgcacctgat

SEQ ID NO: 508 - DNA, 51 bp, Staphylococcus epidermidis
aatcaacgactcgaggaaacaatttcctctccccatcacagctcagcctta

SEQ ID NO: 509 - DNA, 1299 bp, Staphylococcus epidermidis
atgaaacaatttttaaacatcactcaacgtaaatttatcgaatggttgattatcttatccatttttatagttagcattcctaataaatggacattaatgatatctatcgctttatctttattacttcttaaaagaggggcgctaggtgtcgttcaattaatcatactttatatgctcagatcgcaaatatacaccccatatgatacacaagagatggcgcattacatagtaagtatgaaatatatcttgatttatgtaattggagtattttttctatttaaatatgtaaaacattggataagaaatgaaatgatattaagatttatcaagtctactatgattcttatgctactttatatcataatgagtttagtcgtatctaatgatccgatagaatctattcttaaattgcttaacttctttataccgctaattttgattgttatgtatgttagtttaataaaaaagataaagaatctcattaactggattaatcaatttatcacgctagtgattgcctttacttttttatttatagttatagcgccaaaatcatatttaattgatgaggaatcacttagaagtgttttcaaggatgcacattcattcgcagttattcttgctatgggtctagttctatatatggtaacaataatcaaacaacaagattatgatgtattcaatttattattattaaatattggaatgatagagctctatttatcaaattctcgtcatattttcatatctgttattttatgtctaatgcttctattaccgttatctcacataaaaaagagaattaaacatcccataattggtgctatgatactaatggcaattgctataataaatcaaccatatatttatcatctttttattaaactaatcttaaaagggaagaatagccaagaggtctttatgccgagtgatatgaatattaaagctattgattatgcgctaactgagcatccttttttaggaagcggttttggtataccaatgataaaagcgagttcagaaatacaatactttaatgtagcaacgagtaatatcatcttcggtatgattatctttactggaataataggacttactttatgtacgatatacatgcttcatatggtacttttagttacttttccaatgagtattactattttattatttttaatcactatctttgttaatatggattatattattttatttgattccgtggggctaggtatattgtgttatatattttggggaatatatttaaaagaaggtatgtatcaatacaacaacggacaatgg

SEQ ID NO: 510 - DNA, 1107 bp, Staphylococcus epidermidis
atgacaaatcaaaaaactgtgggtctagtcgtcgctccaggtgttactgaacgccttgcagaaaatctcatacaagaaatgcctaaaatgttatctacacattatgatcatcagcaagaatggatttttgatttagttacggatccgcttactggttttgctgaatctgtagatgaaatttttgggaaagtagccgattatcacgataagagacaatgggattatgtgatagcaattacagatttaccgatgtttgcggacaagcaagtgatggcattagatattaatatggaaaatggtgcagctatattctcatatccggcatttggctggcgtccagttaaaaaacgtttcaagcatgcgatttataatattattcaagaattaaatgaagctgaacaagaaagtcgtaattatgataataataagcaaatagaaaattcagtaaaaaaacaatttccgctctctaaaatagataaagaaacaatatatatgaaagaaacagactcttatcacttaagatatttatcaagttcacgttctagaggcatgtttcgccttgttagtggaatgacctttgcgaataatccattaaatatgatggcaagtttaagtaatatagtagctattgcatttactacaggtgcatttggacttgtatttacaacgatgtggcaaatggcttataacttttcaatgtggcgcttatttggaatttcaattattgcgattattggaatgctaatatggataatgatgtcacatgatttatgggagccagttaataaaagcaaccataagcatattacttggttatacaatcttacaacaataatgacattgatttttgccattataatttattatattattctttatttactattcttaattgctgaaatcgtattattgccatcaggattcttaggtcagcaagttggattgaaaggtcctgcaggcattgatttgtatttaagtattccatggtttgcagcttcaatttctacagttgcaggtgcaataggtgctggtttacttaatgatgaactcattaaagaaagcacatatggatatcgtcagcgtgtaagatacgaagaacaacgtcga

SEQ ID NO: 511 - DNA, 747 bp, Staphylococcus epidermidis
atgaaattctgccctcattgtggaaatccgataaaaaaggaacagtcattttgtaataaatgtggaaaacatttaaagacatcgacacaaagaaaaagtgaaaatcaaattgaacatatgcgtgaacagcaatcgtatatttctcgtgaggaaagacaacatcatgattcaacattttataaagaacaaaaacatactggttggctaattgtattatcaattatatttgtcttgttgatagcagcgctattgtatggtgcgtactatgcttacaatcattatattagtgatgagcaaagtcaccaaacaacagagtctcagcaatcaaatgaaagtgatcaaaatagggaccaatccactggtccaagcattgatgtttttagtgatgactttgatcaaggttatatgaagtcagcttcaacaagtggatatagaggtgtttataatggaatgacacgtgaagaagttgaagataaatttggaacatccaatggttctgtagaaagtttgaagtggagttacgaaacatatggtgatttagctgtagcctacgatgataatgaagttgttagcgtaggtgtagcacctaatcatatttcagaagatcaatttttaagtatgtataatgaaccggatgatagaaattcaagccaactcatttatgatagtaacaaagataatgacttctctgtgttagctaatgttaaaaatggagatgttactgtcattgaaaatgtaaatcaaatt

SEQ ID NO: 512 - DNA, 1296 bp, Staphylococcus epidermidis
atgttattgtttatcatagaaatcataatcatgattctagcgatattattaggattaagaactgctggtgcactgggatgtggcatctttgctatagtagcgcagcttatcatgatatttggattccagttacctccaggttcagcaccagtgacggcagtgttaatcatattatctattggtatagcaggtggtacgttacaagccactggtggtattgactatttagtatacattgcatcacgtgtgattgaacgctttccaaaatcaattatatttatagcgccaatgattgtctttgtctttgtttttggaattggtactgcaaatatagctctttcacttgaacctatcatagcgaaaactgcacaaaaagcacgaattcagcctaaacgcgcattaactgcttcggtacttacagccaatttagccttactttgtagcccggcagcttctgctacagcttatattatttctgtattagcagggtatgaaatatcgatgggcaagtatttaagtattgttttacctacagctttaattagtatgttaatgcttagtacattttgtacatttgtaggacgaaaagaacacgtgcgtgatgagtcagaacgtttagttcagatgccagaagtcgaaatcaaaaatgacttttcattaaaagtaaaaataggtgttatctcattcctattatgtgtcatgggtattttaacgtttggcatatttcctaatctcatgccgcaattcaatgtgaatggagatgtagttaaagttgagatgactgaaattgttcagttctttatgtatctcagcgctacaatcaatttattattaataaaaatcaatacttctgatattctgtcatcgaatattacacaatctgcaatgggagcactttttgcagttcttggcccaggttggttaggtgcaacaatatttaatgctccacataacttaaaaatattgaaaaatgatattgggtcaattattagtgaagtaccttggcttgttatcatacttgtttctgtagttgcaatgattgtcatttctcaaacagctacagcatcaattatggtgccgatagttatgagtttaggtatacctcccatctattttgttgcgatggtacaaacattaaatgtgaatttcgttattccagctcaaccgacactattatttgctgtagaactagatgaaacaggtagaacaagacctacgagctttatgataccaggattttttgttataacagtatccgtcattacaggatttgttattaaaaccattttaggatat

SEQ ID NO: 513 - DNA, 1449 bp, Staphylococcus epidermidis
atgggaagtttttttaatcggatgactcgaaaagagaatcctactatttatcaaaataaagatgggcatcttaagcgcacgttacgtgtacgtgactttcttgcactaggtgttggtacaattgtctctacatctatcttcactttaccaggtgttgtcgcggctgagcatgccggacctgctgtggcattatcattcttattagctgccattgttgcaggtcttgtagcctttacttatgcagaaatggcatctacaatgccttttgctggatcagcttattcatggattaatgtactttttggtgaattattcggatgggttgccggttgggcgcttttagcagaatactttattgctgttgctttcgttgcttcaggcttttctgctaacttaagaggtcttattgcaccattaggcatttctttacctaaatcattatctaatccatttggaagtaacggtggtgtcattgatatcattgctgctgtagtgattattttaactgcattactattatcacgcggaatgaacgaagccgctcgtatggaaaatgtattggttatattaaaggtgttagccatcattttatttgtgattgttgggctaactgcgattaatttcagtaactatataccatttattccagaacataaggttactgaaactggcgactttggaggttggcaaggtatttatgctggagtttcaatgattttcttagcttatattggttttgactctattgctgctaattcagctgaagcgattaatccacagaagacaatgcctagaggaattttagggtcactcatagtagcaattgtattgtttgtggccgtagcacttgttcttgttggcatgttccactactctcaatacgctgataatgcagagccagtaggttgggcattacgagaaagtggtcatggtattattgctgcaattgttcaagcaatttctgtcatcggtatgttcactgcattaatcggtatgatgcttgcaggttcacgtctattatattcatttggacgagatggtttactcccttcttggttaagtcaattgaatcacaaacatttacctaatcgagcacttgtcatacttacaatcattggcgtagttatcggatcaatgttcccgtttgctttcttagcacaattgatttccgcaggtacccttgttgcattcatgtttgtgtcactagcaatgtatcgattaagaaaacgtgaagggaaagatttacctaagccagagtttaaattacctttatatcctattttgcctgcaattacatttatattagtattgctagtattttggggattaagttttgaagctaagttgtatacactgatatggtttattgtaggtataattatttatttaatttatggaattagacattccaaaaagaatgatgaagaagcgtatcaagtacctagagaa

SEQ ID NO: 514 - DNA, 1071 bp, Staphylococcus epidermidis
atgacaaagaaaaaacgtttatcgcctagtgagtggttgcttaaacaatctaaaagacataaaaggaaaaatacactttacacggcaattgtacttttagtagcgttagttctactcatatttgctgttaaatcaatacaagtagaacctgtaaaaagtgatacgagagacaaagatagcattcgtatcacctatttaggtaacgtcactttaaataaacatattcgacaaactaacttgaatgatgtttttaaaggtattcaagatactttagatcatagtgatttttcaacaggttcattaatagtaaatgatttttcaagaaatcaaaaagataacataaataaaaatattgaaaatatcatgtttctacgcaagcataatgttaaaagtgttaacttaatcaacgaatctatggataatattcaagcgacagcaatgatgagaaaaatagattcccaagcaggttataattttttaacaggtaatggttcaaatccaattaatagtaaaactgtacaacaagacattaaaggtaaaaaaatagctaatgtttcatttaccgatatcgaatctaactatactaactctttaaaaaacacgacgtcaattagtttagatccagctatattttatcctttaataaaaaaattaaaggaaaataatgattacgtcgtagtcaatgtagattgggggatacctaatgaacgaaatgtgactacacgtcaaaaagaatatgcacatgcgttagcgaatgctggtgcagatgtcattattggtcataatacagttattcaaaaagttgaaaattataagcgaacgcctattttttatagtttaggtaacacaacgtctgataacttcttatcaaaaaatcagaaaggaatgattgtacaacaagactggaaaggttcgcataatcagttccatatcacaccaattcaatcaaaagatggaaaaatctctaaagataatatgaataaaatggatcatattcgattcaaaaataacattaaagataaatcaattgatttaaaatctgatcaaaatggaggttatacttttgaatat

SEQ ID NO: 515 - DNA, 699 bp, Staphylococcus epidermidis
atgattgaacatttaggaattaatacaccttattttgggatattagtatcattaataccatttgtcatagcgacttatttttataaaaaaacgaatggtttctttttactagcacctttattcgtaagtatggttgcaggtattgcttttttgaaattgacaggaattagttatgagaattataaaatcggtggcgacattattaatttcttcctagaaccagctacaatatgctttgcgattcctttatatcgcaagcgcgaagtattaaaaaaatattggttacaaatatttggtggtatagctgttggtacaattattgccttgttattaatttatcttgttgcaataacattccaatttggcaatcaaattatagcatctatgctacctcaagctgcaacgacagcaattgcattacctgtatctgacggtatcggtggtgtcaaagaattaacctcactcgcagttattttaaatgcagttgtcatttctgctttaggtgctaaaatagttaaattatttaaaatatctaaccctattgccagaggacttgcactagggacaagtggacacactttaggtgtcgcggcagctaaagaattgggtgagactgaagaatcaatgggaagtattgcagttgtcatcgttggcgttattgttgtagcagtagttcctatacttgctccaatcttatta

SEQ ID NO: 516 - DNA, 699 bp, Staphylococcus epidermidis
atgaaaagaacagataaatatagagattcatacaaatatgatgaccaatatcaaaatcatcgtaaacgttcagaagaagatatgtatcgacaacatcaagagtcccaacagagagcaaattcaaatcgtgcaacacaaagtgaaaatgatagagagtatgaaaatcatcctgaacgttattacaatggaagagactatcgacgtgagcagcaattggaagaagaaaatgaaaaatcaagcaaaactaaaaaatggctgattgcaatcatagttattttactcattattgtagctatctttatcacgcgtgcaattatcaatcataataatgataaagtaagtaatgaccctaacgtttcacaaaactataaaaaggaagttgaaaatcaaaacgacgacattaatcgacaagttgattcagccaaaagcgatataaaaaataaaaaggacacccaatcccaaattgataaactacaaaatcaaattgatcaattaaaacaaaatgaagaaactaatgcggattctaaattcacaaaattttatcaaaaccaaatcgacaaactgaaaaatgcaaataacgctcaacttaataacgaaaatcaaagtaaagttaacaacatgcttgaagacatcaatacaaaatttgatagtattaaagctaaactagaaaatatcttgaatggatcaaattcaggaaac

SEQ ID NO: 517 - DNA, 1161 bp, Staphylococcus epidermidis
atgaacatgaaaaagggtgtttctcagcttacgttacagacattgagtttggtcgcaggctttatggcatggagtatcatttctccattaatgccatttatttcacaagatgttgatatttctccaggacaaatatctgtcattttagctattcctgttattttaggttctgtactacgtgtaccatttgggtacttaactaacattgtaggagcgaaatgggtgtttttctggagttttattgtactattacttccaatttttcttttaggtcaagctcaatcacccggtatgctaatgttatcaggattctttctaggaattggtggcgcaattttttcagtaggtgttacttcagtacctaaatacttttcaaaagacaaagttggtttagcaaatggtatatatggtgtaggtaatattggtactgcagtttcatcattttgtgccccagtgttagcaggtgcaattggctggcaaaatacagttcgtagttatttaattattctaagtatatttgcaattttaatgttttttttaggagataaaaatgagccgaaagtgaagattcctttgatggctcaagtcaaagacctatctaagaattataagttgtattatttaagtttgtggtattttattacttttggagcttttgtggcttttgggatttttttaccgaactttctagttgatcattttagtattgataaagtggatgcaggtattcgttcaggtatatttatagcactagcgacgttcttaagaccggttggtggtgttataggtgataaatttaatgcagtacaagcgcttatcatcgacttcgtgataatgattattggtgcgcttatattaagcttatctagtcatattgttctgtttacgataggctgtttagcaattagtatctgtgcaggtataggtaatggtttaatatttaaattagcaccttcatacttttctaaagaagcaggttcagcgaatggtattgtatccatgatgggaggactaggcggtttcttcccaccactggtgattacttttgtaacgagtatcactggttcaagtcatctcgctttcttcttcttggctatatttggtgtaattgctcttattacaatgattcatttaaataaaaaagagaaagctattcgtata

SEQ ID NO: 518 - DNA, 348 bp, Staphylococcus epidermidis
atgaaaaataaaaaaggattaggcataggtcttatcacaattatgattatcgtttgtattgtactagtaatcatgatgttcgtgggtggtaagaaagaatcatactacggtattatgaaagatagcacgactattgataaaatgataaatactaaaaatgaaaaaattgaaaaaaacgtagaattacctaaagatgctaatgtatcagttaaaaaagaagattttgtgatgctctttaaagatgaaaaaactggaaaaattactaaagttaagaaagttaatcacgatgacgtacctcatggtttaatgtcaaaaatccatgatatgggtaatatgaaacacggaatg

SEQ ID NO: 519 - DNA, 642 bp, Staphylococcus epidermidis
atggctatgtcattactcgtgagtcttgtggtttatatgatgacactcacatctgatatattagaagatattctatcatttaaattagaagtgataatgcaatttccgtatatattaagctctatttcactaatcattttgtttatacttttcattttaaaagatatggaaaaaatatggtactggctcatttcaatagttatgattgctgtgataagtatgtctggacacgtgtggtcacaacaagtgccattatggtcaattatcataagaacaattcatcttatagggctaacgttatggttaggttcactcgtttatctcatttgttatgctattaaagtgaaaattaatcagttgacgagtgtaagacgtatgcttttaaaagttaatatcattgctgtgattatgctcgtttttacagggattttaatggctattgatgaaacgaatactttaacactttggaataatgtgagcgcttggtctatttatcttgtcataaaaatcgcaggaattattgctatgatgctattaggtttctatcaaacgatgcgtgctttgagacaacgacaacaggtccatcgttttgcactgatgactgaattgttaattggtatgatattaattttgcaggtatca

SEQ ID NO: 520 - DNA, 1146 bp, Staphylococcus epidermidis
atgaaaaactctagattttctgggttccaatgggctatgatggtctttgtatttttcgttatcacaatggcattgtccgtgatactcagagattttcaagcgactatcggagtgaaacgttttgtctttagtattaaagatttagctcctttcatagctgcaattgtgtgcatattagtatttaagcacagaaaagaacaattagcaggattgaaattttctatcagtttaaaagtgattgagcgtctacttttagcactcattctaccacttatcattttaatgattggcttgtttagctttaatacttatgctgatagtttcatcctattacaaacttcagatttatcagtatcattattaactatattaattggtcatattttaatggcttttgtagtggagtttggtttccgttcttacttacaaaatattcttgaaacaagaatgaacacattttttgcgagtattgtcgttggtcttatttattcagtatttacagctaacacgacatatggtgtagaatacgccggataccatttcttatatacattcatgttttcaatgattattggtgaattaattagagctactaatggtcgtacaatttatattgcaactgcttttcacgcatccatgacttttgctctcgtctttttatttagtgaagaaacaggcgaccttttctcaatgaaagtcatcgcactttctacaacaattgtgggtgtttcatttattattattagtctaatcattcgtgctattgtttataaaacgacgaaacaaagtttagacgaagttgatcctaataattatttatctcatattcaagatgaagaaccaagtcaagaagacgcctcttcaacttcaaatcatgatgtatcatctaaagatgaaacaaagcaacaagatattgataatgacaaacatcaatcaaagaaacctaataagagtgacgatgcacttactacttctaattataaagaagacgcctcttcagttaataaagaaacggatacaactcacaatgataacattaaagatcattcaacttataccgaagatagacactcatctgttgtcaacgatgttaaagatgaaattcacgaagttgaagatcataaagccgacacagataaatcacat

SEQ ID NO: 521 - DNA, 1374 bp, Staphylococcus epidermidis
atggaaaataatgagttgcaaaggggattgaatgcacgtcagatgcagatgattgctcttggtggaacaattggtgttggtctttttatgggagcaacaagcacaattaagtggacaggtccatcagttattcttgcatatttaattgctggtatttttttatttttaatcatgagagccatgggtgaaatgatatatattaatccaaccactggttcttttgcgacgtttgctagtgactatattcatccagcagctggctacatgactgcttggagcaatgtatttcaatgggttgtcgtcggcatgagtgaagtgattgcagtaggagaatatatgaactactggttcccaagccttcctaattggataccaggagtgatagcagttctctttttgatggctgctaacctagtttcagtaaaagcgtttggagagtttgaattttggtttgccttaattaaagttgtaactattgtattaatgattattgcaggattaggattaattttatttggtataggcaatggagggaatccaatagggatttctaacttatggtcacatggtggatttatgccaaatggattcattggatttttctttgctttatctattgtgattggatcataccaaggtgttgaattgattggcatctcagcaggtgaaaccaaaaatcctcaaacaaatattgtaaaggcagtcaacggagtgatatggagaattttaattttctatattggtgcaatttttgtcattgtatcagtatatccttggaaccaattaggtagtattggtagtccttttgttgcaacgtttgctaaagtgggcattacgtttgctgctggtttaataaactttgtagtcttaacagcagcattgtctggttgtaattcaggtatttttagtgcaagtcgaatgatttatactttggcaaaaaaaggacaaatgcctaaagtatttactaaagtaatgaaaaatggcgtacctttctacactgtatttgcagtatctatgggaatattaattggtgctttattaaatgttatacttccattaattattgatggagctgatagtatctttgtatatgtatatagtgcctctattttaccgggaatgataccttggtttatgattttatttagtcatctaagatttagaaggttacatcctgaaaaggttcacaatcatccttttaaaatgccgggaggggcaattgccaattatttaactatcatgtttttactcctagtattagtcggtatgttacttaacaaagaaactgtagtatcggttgttattggtatcgtgtttttaacagctgtgacactttattatcttattagatatcacaaaaaggaacgacaaata

SEQ ID NO: 522 - DNA, 534 bp, Staphylococcus epidermidis
gtgaaaagacttaagaattttattctcggcttactcattgtggctatagttggcttcctattatttatgtatatagatgatagtcgcattcaaagttatcaagactacttcttacaatttaattggttccaaccactattgattgggcttgcaggattacttatattaatcggacttatattagtacttagtatttttaaacctacgcatcgcaaacctggactttataaaaactttgatgatggacatatttacgtatcacgtaaagctgttgaaaaaacaatttacgatacaatcgctaaatatgatcaagttagacaaccaaatgttgtaagtaagctttataacaaaaagaataaatcatttattgacatcaaagcagatttcttcgtaccaaaccatgttcaagttaagagtttaacagagagtatccgtgctgatatcaaaagtaatgttgaacactttactgaaattcctgttagaaaattagaagttaacgtacgtgatcagaaaacatctggtccacgtgtattg

SEQ ID NO: 523 - DNA, 1455 bp, Staphylococcus epidermidis
ttgcaagattttgataacttaattcctggctggtttaaaacatttgttcaagtcgggaatgacttaatttggtctcaatatcttattggattattattaacagcaggttttttctttacaattagttctaaatttattcaactcagaatgttaccagagatgtttagagcattaactgaaaagccagaaactttaagtagtggtgagaagggtatttcaccatttcaagcttttgcgattagtgctgggtcaagagtaggaactggaaatattgccggtgttgcaactgctattgttcttggtggccccggtgcagtcttctggatgtggattattgcttttattggtgcagctagtgcatttatggaagcaacgcttgctcaagtttataaggtacatgacaaagaaggtggattccgtggcggaccagcctattacataacaaaagggctaaaccaaaaatggcttggaattgtatttgctgttttaattacagttacatttgcttttgtatttaatactgttcaagcgaatacaattgctgaatcattaaatacacaatacaatattagcccggtaattactggaatagtacttgcagttattacaggtattatcatctttggtggtgttcgtagcatagctacactatcttcacttattgtgcctattatggctattgtttatataggtatggttttaatcattttattactcaatatagatcaaattgtacctatgattggcactattattaaaagtgcattcggagttcagcaggttactggtggtgctgtaggagctgctattcttcaaggtattaaacgtggtttattctcaaacgaagctggtatgggatctgcacctaatgctgctgctacatctgctgtgccccatcccgttaaacaaggtttaattcaatcattaggtgtattctttgacactatgcttgtttgtacagctacagcaattatgattttattatattctggtttgcaatttggtgatagcgcgcctcaaggtgtagcagttacgcaatcagcgttgaacgaacatttaggttcagcaggaggtattttcttaactgtagcagttaccttatttgcattttcatctgttgtaggtaactattactatggacaatccaatattgaatttttatctaacaataagatgatattatttatttttagatgttttgtagtacttttagtatttgtaggtgctgttgctaaaacagaaacagtttggagtactgccgatttatttatgggtcttatggcaatagtaaatatcatatcaattataggtttgtcgaatattgcgtttgcagtgatgaaagattatcaaagacagcgtaaagaaggtaagagacctgtgtttaaacccgaaaacttagaaataaatttatttggcattgagacttggggacaacatgcaaaaatgccaaaaaaa

SEQ ID NO: 524 - DNA, 573 bp, Staphylococcus epidermidis
ttgaaaaaagaaattttagagtggattgttgccatagccgttgccattgcacttattgccataatcactaaatttgtcggaaaatcatattctattaaaggtgattcaatggatcctacattaaaagatggggagcgtgtagtggtaaatattattggctataaattaggtggcgttgaaaaaggaaatgtcattgtatttcatgctaataaaaaagatgattatgttaaaagagttattggaactccaggagatagtgttgaatataaaaatgatacactctatgttaatggtaaaaagcaatcagaaccatacttgaactataatgaaaaacgtaagcaaactgagtatatcacaggtagtttcaaaacaaaaaatttaccaaatgctaatcctcaatctaatgttattcctaaaggtaaatatttagttttgggggataaccgtgaggtaagtaaagatagtcgttcattcggtttaattgacaaagaccaaattgttggaaaggtatcgctcagatattggcctttcagtgaatttaaatctaactttaatccaaataacactaaaaat

SEQ ID NO: 525 - DNA, 1083 bp, Staphylococcus epidermidis
atgttcaataaggtttggtttagaacaggaatattttttattatgctgttcatactcatcaaactatttatggaagtgcatgaagtatttgctccaatagctactatcattggttcagtcttccttccatttttaattagtggatttctcttttacatatgtttaccttttcaaaacatattagaaaagtggggctttccacgttgggctagtataacaacaatattcataggattaatagctatcatcgctattgtggtatcatttatagcacctatcattatttccaatattaataacttaattaaacaaacaccatcattacaaaaagaagccgaacaattaattaatttctcgttaagacaaatggataaattaccagatgatgtcacacatcgtattaataaagcggttaaatccatgggagatggcgcaacgtctattttatctaattcagtgtcatatattacgtctttcatctcaactgtatttttattaataatggtgcctttcttcctgatatatatgctaaaagatcatgaaaaatttatcccagcaatcggtaaatttttcaaaggagaacgtaaagtttttgttgtagatttattaaaagacttaaacttcactttaaaatcatatattcaaggtcaagtgacagttagtatcatcttaggtattattttatatataggttatacgattataggattaccatatacacctttattagtattattcgccggcgtagctaacttaataccatttttaggtccatggttatcttttgcaccggcagcgatactaggtattattgatggcccttcaacttttatttgggtatgtgtcgtaacattaatcgcacaacaacttgaaggtaacgtgataactcctaacgtaatgggtaaatcattaagcattcatccattaactattattgttgtcatacttgcagctggagatttgggtggtttcacactcattcttgttgcagttccattatacgctgtaatcaaaacattagtgagcaacatttttaaatatcgtcaacgtattgtcgataaagcaaatagtaatgttaaagat

SEQ ID NO: 526 - DNA, 288 bp, Staphylococcus epidermidis
atgaatacaatcgtaaaacatacagtaggttttattgcttctatcgtactaacgcttttagcagtttttgtaactctatacactaatatgacattccatgctaaggtaactatcatctttggttttgctttcattcaagctgcccttcaattattaatgttcatgcatttaactgaaggtaaagatggacgtttacaatcgttcaaagttatctttgcaattatcattactttagtaactgttatcggaacatactgggtaatgcaaggtggacactcttctcactta

SEQ ID NO: 527 - DNA, 1290 bp, Staphylococcus epidermidis
atgtcttttcttaggaaacacaccgaaattatatttagttatatcatcggtatcgtttcactttttacaggtctcattatttttattaacttacctttaatcaaacaatttaaaggtgacaaaaaggttgatacgcatgtgcataacgtatgggaattcctaaatgccttttttgccgagattataaaagtgatgagtaaatttattggtggctttccaattacaagtgccatagtaatcatcgtatttggtattctagtgatgctgttaggtcacactttatttagaactattaaatacgattatgacatttcaattttctttttagttattggcattatgtactttatcattacattattgctaatgacacaagtgtatggcttttttgctatcgtctttattattccttttacagttcatattggttacatagtttataaagatgagttgaaccaagacaatcgaaagaaccattatatgtggattattgtaacttatggaatgagttatcttattacccaaatttcgctatatggacgtattgacgcaaatgaaattgaatcaattgatattttaagtgtaaatacattcttcattattatgtggttattaggtcagatggctatatggaatttcttattcctaagacgttcattaccactcactaaagaagaattaggcgaagaggaacctgaactttcaagaactaataaaggcaatgtatctaatcaaactaaagttcacttaaaacaactacaaaataagacaaccgagtatgcacgtaagactagaagaagtgttgatttagataaaattagagccaaaagggacaaatttaagcaaaaaattaacagcatagtagatatacaagaggacgatattccaaattggatgaaaaaacctaaatgggttaaacctatgtatgttcaattgttttgtggtgtaattattctgttttttgcttttctagaatttaataatagaaacgcattattcttaactggtgaatgggagttatcacaaacgcaatatgtagttgagtgggtaacattattattgctacttttcattattattatttatattgcaactacattaacttattatttaagggataaatattattatttacaactctttatgggcagtattttattctttaaatttcttacagaatttatcaatattatggtacatggattattattatcaattttcattacgccaatcttattattaatgcttattgcaatgattgttgcttattctttacagttgagagaaaaa

SEQ ID NO: 528 - DNA, 1149 bp, Staphylococcus epidermidis
atgttaggagagcaatatacacaaattaagcgtccagcaaatcggctaactgaaaaaatattaggttggtttagttgggtattcttactcatattaactattgtttcaatgtttattgcgctcgtatcttttagtaatgatacgtcaattgccaatttagaaaacacacttaataataatgaactcgtacaacaaattttagccaataatgatttaagtacaactcaatttgtgatttggttacaaaatggagtttgggcaattattgtttattttattgtttgtttgctcatctcgtttttagcgttaatttctatgaatataagaattttgtctggtttactttttttaatagctgctatagtcacaattccgcttgtattgttgattgtaactctaatcattcctatcttattctttatcattgcaatgatgatgtttgctagaagagatagaatagaaacagtgccatcttattataatgaatatgatcaaccatactatgatgagagaggtttttatgaaccagagtcaagaaatgaacatggatataatgatgatgtgtatgaacctatgcatactaaaaaggaagatagaaatacaagacgtcaattcaatagaaatgctcagcaacaagattcctataatggtataactgataatcaacccgatgaagatacatcttccgatcaactttattcagacgaatatgtagataatgaagataaatattctcaatttccaaaaagagcagttgaaagtgaatatgcatctcaacaaactgaagatgaaccaacagtcatgtcaagacaagctaagtacaataaaaaatctaaaaatacggattttgaagatgcgcaacaggaacatatggaaggtaatcaatttgatgacgtaggagttgttgaaccacaaattgatcctaaagaactaaaagcgcaaagaaaaagagaaaaagcagaaatacgtgctaagaaaaaagaaaagagaaaagcatataataaacgtatgaaagaacgaagaaaaaaccagccaagtgctgttaaccaacgacgtatgaattatgaagaacgtcgacaaatgattaataatgaacaagaagatacagataataacttaaatcaacaggaagattcaaaaaaagaaaat

SEQ ID NO: 529 - DNA, 1389 bp, Staphylococcus epidermidis
atggaagagaataaaaatcaacctaataatgagaatatgtcgaataaagacgataatacaatccatttgaatgatagtcaaagtaatgaagacttagagctttttagacggaataaaaacgctcgccaacgcagaagacgtcgcatagataaccaaagtaaagaaaaagatgctacgtctacacaatcacagttagaaactaaaccaatggataaatttattgataatcacaagtcgcataatcaagataaagaaataaaaagtgatttaattgaggataatgttaatgatgaagatgacaatcaaaaatataataatgataaattaaatgatcgtagtgttcaacaaacaagcgaaacgcgtcaaagtaatgaagacgaagaggaatttctaactgatcatcagagcgaaaaacaaactaaagactctcgtcattctaaaaaacataaattactaagtaaatttacttctaaaaaagaaaaggaaacatttacatcgttcaatagtaatgagaaggtaactcaaattaaaccgcttagtttagaagaaaaaagagccataagacgtaaaaagcaaaaaagaatccaatatacaattatcacactactcattcttatcattgttctcattttactctatatgtttacaccactaagtaaaatatcaaatgtaaatattaaaggtaataacaacgtaagtacgagtaaaataaagaaagaacttaacgttacttcacgttcacgaatgtatacttttagtaaaaataaagcgattaggaacttaaaacagaatcctttaatcaaagaagttgatattcataaacaattaccaaacacgttaactgttaacgtgactgagtaccaaattgttggtttagaaaaaaataaagataaatatgtgccaattatagaagatggtaaagaattaacagaatacaaagatgaagtttcacatgatggacctatcattgatgggttcaaaggagacaaaaaaacacgaattataaaagctttatctgaaatgtcacctaaagtgagaaacttaatagcagaggtgagttacgcaccaactaaaaataaacaaagtcgcataaagatttttaccaaagataatatgcaagtcattggtgacattacaacgattgcagacaaaatgcaatattatcctcaaatgtcacaatcattaagcagagatgattctggcgaacttaagacaaatgggtatattgatttatcggttggagcgtcatttattccttatcaaggttcatcaactgttcaatcgggtactgaacaaaatgtaaccaagtcaacacaagaagaaaatgatgcaaaagaagaacttcaaaatgtgttgaataaaattaataaacaatctaaagaaaataat

SEQ ID NO: 530 - DNA, 1455 bp, Staphylococcus epidermidis
atgaagtgtttgttcaaaatgctatcaatcataataataatgttaagtactttcaccttattcatcagtccgagtacatatgcaaatgaagatgaaaattggactaaaataaaaaatcgaggagaactaagagttggattgtcagctgattatgcacctttagaatttgaaaagacgatacatggtaaaactgaatatgcgggtgtagatatagaattagctaaaaagattgcgaaagataatcatctaaagctaaaaattgtaaacatgcaatttgatagcttattaggtgcacttaagaccggtaaaatcgatattattatctccggtatgacaacaactcccgaacgaaaaaaagaagtggattttacaaaaccttacatgattacaaataatgtgatgatgattaaaaaagatgatgcaaaacgttatcaaaacatcaaagattttgaaggcaaaaaaattgctgcgcaaaaagggacagatcaagaaaaaattgcacaaactgagattgaagatagtaaaatttcttcactcaatagattacctgaagctatattatctttaaaaagtggaaaagtagcaggtgtagttgttgaaaaaccagtaggtgaggcatatttaaaacaaaattcagaactaacattttcaaagattaaatttaatgaagaaaagaaacaaacatgtatagctgttcctaagaactctcctgtacttttagataagctaaatcaaacgattgataatgtaaaagaaaaaaatttaattgatcaatacatgacaaaagcagccgaagatatgcaagatgatggaaattttatttctaaatatggcagttttttcattaaaggaattaaaaatactattttgatttcattagtaggtgtggtattggggtctattttaggctcttttatagctttattaaaaataagtaaaattagaccattacaatggatagcaagtatatacatagaatttttaagaggtactcctatgcttgtgcaagtgtttattgtattttttgggactactgcagctttggggttagatatttcagctttaatttgtggtactattgcgcttgttataaattcttcagcctacattgccgagattattagagctggtattaatgctgtagataaaggacaaactgaagctgctagaagtttaggattgaattatagacagactatgcaatcagtagttatgccacaggcaattaagaaaattttacctgcattaggtaatgaatttgtaaccttgattaaagaatcgtctatagtttccacaattggagtgagtgaaatcatgtttaatgcacaagttgtacaagggatatcttttgatcctttcacaccattgttagttgcagcattactatatttcttacttacatttgcacttacacgtgttatgaattttattgaagggagaatgagtgccagtgat

SEQ ID NO: 531 - DNA, 663 bp, Staphylococcus epidermidis
atgcaacaagaaacgacatcatggtacaaacaagaatggtttatagttttatcacttttattcatttttccactaggtttatttctcatgtggaaatttagcaagtggccatctattgcaagaacaatcattactgttgcaatttcagttatcgtattagcaagcattacctattatggtaatctacaaatgattgtaccagcaacatcaaattcaaataacgaaactaaagaaactacagagaataatgtaaatgataaagacgagcgaaatcataaaactgcagtagaagaaacaaaaactaattatgactccaccaaagaaaatactaaagaacctggaaaagaaaatgaatctgcaacacgattggagaactctgcgcttgaaaaggcaaagtcatattatgatgattttcacatgtctaaactaggaatttatgatattttaacatctgaatatggagaaaaatttgataaagaagatgcacaatatgctatagatcatctagaggctgattatgaaaagaatgcacttgagaaagcaaaatcatatgccaaagatatgcatatgtctaatgactcaatttacgatcttttggtgtctaactacggtgaaaaatttacagaatcagaagcaaaatatgctattgagcatttggataat

SEQ ID NO: 532 - DNA, 1593 bp, Staphylococcus epidermidis
atgagtcataagatattagtatcagacccaatttctgaggatggtttacaaagtattttaaaacatccagaatttgacgtagatatacaaacagatttatctgaaaatgatttagtaaatatgatttcaacttatgatgctcttatcgtacgaagtcaaacccaagtaacagagcgaattattaatgctgcaacaaatttgaaggtcattgcaagagctggtgtaggtgtggataatattaatatagaagcagcgactttaaaaggtattttagtaattaatgctcctgatggtaatacaatttctgctacagaacattcagtagctatgttgcttgcaatggcacgaaatattcctcaagcacaccaatctttacgtaacaaagaatggaatcgtaaagcatttagaggggttgaactttatggcaaaaccttaggtgttatcggtgctggtaggattggtttgggcgtcgctaaacgtgcgcagagtttcggtatgaaaattttagcgttcgatccttatttaacagaagataaagcgaagtcattagatattcaaattgcaactgttgatgaaattgccgaaaaatccgactttgtaacagttcacacaccattaacacctaaaactcgaggaattgttggttcatctttctttaacaaagctaaacaaaacttacaaatcataaatgttgccagagggggtattatagatgaaactgcacttattgaagcattagataataacttaatagatcgtgcagctattgacgtatttgaacatgaacctcctactgattcccctctcattcaacatgataaaattattgtcacaccacatcttggcgcctctactgtagaagcgcaagagaaggttgcagtctctgtatctgaagaaataattgaaattctaactaaagggaatgttgagcatgctgtgaatgctccaaaaatggatttaagcaaagttgataaaacaactcaaagctttataggtttaagtacaactattggtgagtttgctattcagcttctcgatggtgctccgagtgaaattaaagttaaatatgctggtgacttagcgcaaaatgacactagtttaattacaagaacaattataacgaacatcttgaaagaagatttaggtaatgaagtcaatattattaatgcattagcaatacttaaccaacaaggtgtcacgtataatatagaaaaacaaaagaaacattctggctttagtagttacattgagctagaactagttaatgatcaagataaaatcaaaattggcgcaacggtattcgcaggttttggcccaagaatagtacgtattaatgattactcacttgattttaaacctaaccaatatcaattagtaacatgtcataaagataaacctggtatagtaggacaaacaggcaacctattgggaagtcacggaattaatattgcgtcaatgactttaggacgtaacgatgctggtggagatgctttaatgattctttctattgatcaacaagcaagtgaggaagttataaaaattttaaatgaaacaagcggattcaacaaaattattagcactaagttaacaatt

SEQ ID NO: 533 - DNA, 1065 bp, Staphylococcus epidermidis
ttgaagcggaattttattaataatttaatcatattattaattgctattatgttaagtctgttattaaaaatgttacatgtgattttgccatttatgtttggaccaatattagcggcgttattatgtgtaaaagtattaaaattaaaaatacgatggccattttggttgagtcaaattggtttaatactacttggagttcaaattggctctaccttcacacaacaagtgattaaagacataagtaaaaattggctaactatcgtttttgtcactatcctactaattttattagctttgataattgcattcttttttaagaaaattgcacaagtaaatttagaaactgcaattttaagtgttataccaggtgcgctaagccaaatgttagtgatggcagaagaaaataagaaagcaaatatattagttgtgagtttaacacagacatcacgtgtaatatttgttgttattttagtaccacttatttcgtatttttttcaggataaccatcatgaaatgaatcatactacaatggaagtacccacactttctcagactttaaatatatggcaaataatcatcttattctcaatggtgggaatcatctatataggaatgtcaaaaattaacttccccactaaacaattattagcacctataatagttttaattatatggaatatgacaacacatttaacattttcactagatcattggttgttagccacagcgcaacttatttatatgatacgtattggattacagattgccaacttaatgagtgatttaaagggaagaattgcaatagcaatagcctttcaaaatataatgctcatagtcacaacgtttataatgataataggaatacatttgattactaatgaatccatcaatgaattgtttttaggagcagcaccaggaggtatgagtcaaatagttttagtggctatggctactggagctgatgtagcgatgatttcaagctatcacatttttagaatattttttatattatttgtcattgcgccactaattggttattttattaatgttaaattaaataataaa

SEQ ID NO: 534 - DNA, 2289 bp, Staphylococcus epidermidis
gtgaagaaaacgagtagaataattgcattcatactcctcatagctctactattcacaggaatgggtatgacgtataagaatgtagttaaaaatgttaatttaggtctagatttgcaaggtggttttgaagtcctcttccaagtagatcctttaaataaaggagataaaattgataaaaaagcacttcaagctacatctcaaacattagaaaatcgtgtaaatgttctaggtgtatcagaaccgaaaatacaaatcgaagatccaaatcgaattcgtgtacaattagcaggtatcaaggatcaagcacaagcgcgtaaattattatcgacacaagctaatttaacaattagagatgctgaagatcatgttttaatgtctggttcagacattaaacaaggctctgctaaacaagaatttaaacaagaaactaatcaaccaacagttacatttaaagtaaaaagtaaagataaatttaagaaagtaactgaaaagatttctaaaaaacgtgacaatgtcatggtagtttggttagatttcgaaaaaggcgatagttacaagaaagaagctaaaaagcaacaagaaggtaaaaagcctaaatttatatctgcagcgagtgtagaccaacctattaattctagtagtgttgaaatttcaggtggcttcaatgggaaaaaaggtgttgaagaagcgaaacaaatagctgagttattaaatgccggctcattaccagttgatttaaaagaaatttactctaactctgttggtgcacaatttggtcaagatgctcttgataagaccatgtttgcatcaattgtaggtatagcattaatttatttatttatgcttggtttctatcgtttgcctggtttagttgcaatcattgccttaaccacttatatttatttaactttagtcgcattcaatttcatatcaggtgtattaactctacctggattggcggcattagttttaggtgtaggtatggctgtcgatgccaatatcataatgtatgaacgtattaaagatgaactaagaattggacgcacgcttaaacaagcgtattcaaaagcaaataaaagttcattcttaactatatttgattccaacttaacaactgtcatcgctgcagctgtgcttttcttctttggagaaagttcagtcaaaggcttcgcaaccatgttactcttaggtattttaatgatatttgtaaccgcagtattcttatcaagagggttgttatcattactggtatcttcaaacttctttaaaaaacaatactggttatttggtgttaagaagaaggatagacatgatattaatgaaggtaaagatgtacatgatttaaaaacatcatatgaaaggttaaactttgttaaattagctaagccacttatttcacttagtattttaattgtaattattggtttgattatcatttcaatatttaaattaaacttaggtattgatttctcatccggaacaagagcagatattcaatctaaaaatgctataacacaagcacaggttgagaaaactgtaaaatcagttggattggaaccagatcaaatacagattaatggtagtggaaataaaaatgccacagttcagtttaaaaaagatttatcacgtgaggaagacaataaattaagtgctaaggtgaaatctgaatttggagataatccacaaattaataccgtttcacctctcataggccaagagctagctaaaaatgctgtaactgcattaatacttgcttctataggcattattatctatgtttcactaagatttgaatggcgtatgggtctatcttctgtacttgcattattacatgacgtatttatcatcattgcaatctttagtttgtttagattagaagtagatttaacatttattgcagcagtattaactatcgttggttattcaatcaatgatacaatcgtaactttcgaccgtgttcgagaaaatctgcataaagttaaagtaattacgcatactgatcaaattgatgatatagtcaaccgctctattagacaaactatgacacgttctattaatacagtgttgactgtagttgtagttgtagttgcaatattaatattaggtgcaccaacaatatttaatttctctttagcattactaattggattattatctggtgtattctcgtcaattttcattgctgtaccattatggggcatgcttaagaaacgacagtttaaaaagacaaaaaataataaattagtagtacacaaagagaagaaatctaacgatgaaaaaatcttagtt

SEQ ID NO: 535 - DNA, 1242 bp, Staphylococcus epidermidis
atgggggaaaatacaaaacaagatttcaatcaaaaaggacaaaattttaaattcacaaaaaaacatagacgattattatatggttcagtttttttaatggctacatcagctattggtccagcatttctgactcaaactgcagtgtttactgcacaattttatgctagttttgcatttgcaatattaatttctattattatagatataggcgctcaaataaatatttggagaatattagtggtaactggattacgtggacaagaaatatctaataaagtattacctggacttggtactattatctccatactaattgcatttggtggtctcgcatttaacataggtaatattgctggtgcaggtttaggtttaaatgcaatgtttggtcttgatgtaaaatggggtgctgcaataacagctatttttgcgatacttatctttgttagtagaagtggtcagaaaataatggatgttattagtatgattctaggtatcgtaatgattttagtagtcgcttatgtcatggttgtttcaaatcccccttatggagatgcattagtacatacatttgcacctgaacatcctttcaaacttatattacctataattacattagttggtggtacagtagggggttatattacttttgcaggtgcacatagaattctagattctggtataaaaggtaagtcataccttcctttcgtaaatcgatctgctgtagcaggtattttaacaactggtgtcatgcgcaccttattgtttttagctgtactaggtgttgttgtaactggcgttacgcttagttcagaaaatccaccagcatcagttttccaacatgcattaggtcctataggtaaaaatatttttggcgtagtaatatttgcagcagcaatgtcctcagtaattggttctgcatatacaagcgcaacatttttaaaaacactacacaaatcgttactcaataaaaataatcttatcgttattacatttattgtaatttcaacttttgttttcttatttattggtaaaccggtgagtttacttataatagctggtgcgattaatggttggattctaccaatcacattaggtgcaattctcattgcaagtaggaaaaaatctatcgttggtaattaccaacacccaacatggatgcttgtttttggtattatagccgtaattgtcacaataatgactggtatcttttcattacaagatttagcaagtctttggaaaggt

SEQ ID NO: 536 - DNA, 1380 bp, Staphylococcus epidermidis
gtgtctaataataattttaaagatgatttcgaaaagaatcgtcaatctattaatccagacgaacatcaaacagaattaaaagaagatgataaaacaaatgaaaataaaaaagaagctgactctcaaaacagtttatctaataactcaaatcaacaatttcctccgagaaatgcccaacgacgaaaaagacgcagagagacagcaactaatcaaagcaaacaacaagacgacaaacatcaaaaaaatagtgacgctaaaactacagaaggttcattagatgaccgttatgacgaagcacagttacagcaacaacatgataaatcgcaacaacaaaataaaactgaaaaacaatcacaagataatagaatgaaagatggaaaagatgcagctattgtaaatggaacatctgagtcaccagaacataaatcaaaatcaacacaaaatagacccggccctaaagctcaacaacaaaagcgtaaatcagaaagtacgcaatcaaaaccgtcaacaaacaaagataaaaaagcagctacaggtgctggaatagctggtgcagctggtgttgctggtgcagcagaaacatccaaacgtcatcataataaaaaagataaacaagattctaaacactcaaaccatgagaatgacgaaaaatctgttaaaaatgatgaccaaaagcaatctaaaaaaggcaaaaaagcagcagtcggtgctggcgcagctgcaggagttggtgcggctggtgttgcgcatcataataatcaaaataaacatcataatgaggaaaaaaattctaatcaaaacaatcagtacaatgaccaatcagaaggtaagaaaaaaggtggtttcatgaaaatcttgttaccacttatagcagccattcttattctaggtgcaatagcaatattcggtggtatggctctaaataatcacaacgatagtaaaagtgatgaccaaaaaatagcgaatcaaagtaagaaagactcagataaaaaagatggtgcgcaatccgaagataacaaagacaaaaaatctgatagtaacaaagacaaaaaatctgattctgataagaacgcagatgatgactctgataatagttcctcaaatcctaacgctacttcaactaataataacgataatgtagccaataataactcaaattatacaaaccaaaatcaacaagataatgcaaaccaaaatagcaataatcaacaggcaactcaaggtcaacaatcacatacagtatacggtcaagaaaacttatatcgtatcgccatacaatattatggagaaggaactcaagctaacgtagataaaattaaacgtgcgaatggattaagcagtaataatattcataatggtcaaacattagttattcctcaa

SEQ ID NO: 537 - DNA, 1554 bp, Staphylococcus epidermidis
atggctaaaggggaccaatatcaagctcatactgaaaaatatcatgataaaaagtctaaaaaaagttataaacctgtgtggattatcattagttttattattttaattacaatcttgttattacccacaccagcaggattacctgtaatggctaaagcagcactagctattttagctttcgctgtagttatgtgggttacagaagcagttacttatccagtttctgcaacattaattttaggattaatgatacttttactaggtttaagtccagttcaagatttatccgaaaaacttggaaaccctaaaagtggcgacataatactaaaaggtagcgatattttaggaacgaataacgcgcttagtcacgcttttagtggtttttcaacctcagccgtagcacttgtagctgcagcattatttttagcagtagctatgcaggaaaccaatttacataaacgacttgcattacttgtgctatcaattgttggaaataaaactagaaatatagtcattggtgctattttagtatctattgttctagcattctttgtaccatcagctacagcacgtgctggtgcagttgtcccaatattactgggaatgattgctgcatttaatgtgagtaaggatagtagacttgcttcattattaattattactgctgtacaagcagtttcgatatggaatataggtattaaaacggctgcagcacaaaatattgtagccatcaattttattaaccaaaatttaggacatgatgtatcatggggagagtggtttttatatgctgcgccgtggtcaatcattatgtctatagctctttattttataatgattaagtttatgccacctgaacatgatgcaattgaaggtggaaaagagttaattaaaaaggaacttaataaattaggaccagtcagtcatagagaatggcgactaattgtgatttcagtgcttttattattcttctggtcgactgagaaagtattgcatccgattgattcagcttcgattacactagttgctctaggtattatactaatgccaaagattggtgttattacttggaaaggtgttgaaaagaagattccttgggggacgattatagtatttggtgtaggaatctcacttggtaatgtattacttaaaacaggagccgctcaatggttaagtgatcaaacatttggtttgatgggtcttaaacatttaccgatcatagcaactattgcgttaattaccttatttaatatattaatacatttaggttttgcaagtgcaacgagcttagcctctgcgttaatacctgtgtttatttctttgacttcaacgctaaatttaggtgatcatgctattggttttgtattaatacaacaatttgtgattagttttggtttcctactacctgtcagtgcaccacaaaatatgcttgcatatggtactgggacttttaccgtaaaggattttttaaagacaggtatacctttaacgatagtaggttatattttagttatcgtatttagtttgacgtattggaaatggcttggtttagtg

SEQ ID NO: 538 - DNA, 834 bp, Staphylococcus epidermidis
atgttagatttcattaaccatttgcttagttatcaatttttaaatcgtgcattaatcacatctattttagttgggattgtatgtggaacgatgggtagcattattgttttacgtggtctttctttaatgggtgatgccatgagtcatgctgttttaccaggtgttgctttatctttcttatttaatattccaatgtttatcggggcacttgtaacgggaatgcttgcaagtttgtttattggttttattacttcaaacagtaaaacaaaaccagatgctgcaataggaataagtttcactgcattcctagcatctggcgtcataattattagtttaatcaatagtacaacagatttatatcacattttatttggcaatttattagcaattacacatcaatcattttggacaacaattgtcattactgtactggttattttacttattattatcttttatagacctttaatgatttcaacatttgatgcaacttttagtcgtatgagcgggctgaacacaacattaattcactactttgtcatgttattactcgcacttgtaactgttgcgagcatacaaacagttggaattatccttgtagttgctttactaatcactccagcttctacagcttttttaatcagtaaacaactttatgccatgatggtaattgcaagcataatcagcgtgataagttcgattatcggtctatattttagttatatatataatattccaagtggagcaactattgtaatctgtacctttatgatttatattgtaacgctatcaattactagaattaaaaataaacaaaaaaggagcgctttaacg

SEQ ID NO: 539 - DNA, 2679 bp, Staphylococcus epidermidis
ttggcaaagctattatacaaactaggaaaatttatagctaagaacaaatggctaagtgttataggatggcttgttatactaggtgttattatcacgccattaatgataaactcaccgaagtttgacagtgacatcactatgaacggccttaagtcattagacacaaacgataaaatcagtaaagaatttcatcaggacagtgagaaagcctcgatgaaaatagtcttccattctaataagaatgatggactcaataataaagatacgaagaaagatattgaagatgctttagacaatatcagacaaaatgatgattatatccaaaatatctctaatccatatgacagtggacaagttaatgatgaaggcgatactgctatcgctaacgtaagttatgtagttccacaaactggattaaaagattcttctaaacatatcatcgacaaagaattaaaagatgtaactgacaaccataatgtgcaaattgaaaaaactcaaggtggcgctatgaattccgaacctggtggtacatcagaaattgtcggtatcatcgtagcattcgtaatcttacttattacctttggttcacttatcgcagctggtatgccaattattagtgcaatcatcggtttaggttcaagtgttggtatcatcgcattattaacatatatctttgatattccaaacttcactcttacactagctgtaatgataggtttagctgttggtattgactactcactctttattctatttagatttaaagaacttaagaaaaaaggtgtcgatactgtagaagctattgcaacagcagtgggtacagcaggcagtgctgtaatattcgctggtcttacagttatgattgctgtttgtggtttatcacttgtaggaatcgacttcttagcggttatgggattcgcttcagcgattagtgtgttatttgcagtattagcagcattaacactattacctgccctaatcagtatcttccataaaagtattaaaattaaagataaaccaactaaaagtaaagaccctaaagatcattcttgggcaaaatttattgttggtaagccagttatcgctgttattgtaagtttaattattttaattttagctgctataccagtcagtggcatgcgtttaggtattccagatgatagtttaaaaccaactgactcatcagaatacaaagcctataaattaatctcagataattttggcgaaggttataacggacaaattgtcatgttagtaaatacaaaagatggtggaagtaaaagcactatcgaacgtgatttaaataatatgcgtagtgatttagaagacattgataatgttgatacagtttcaaaagcacaactaactgacaacaacaattacgcattattcacaatcattcctgaaaaaggaccgaactcacagtcaacagaaaatctagtatatgatttacgtgattatcatagccaagcgcaagaaaaatatgactatggcactgaaatttcaggacaaagtgttattaacatcgatatgtcagaaaaactaaacaacgctattccagtatttgcaggcgttattgttgtattagcattcttcttattaatgattgtgttccgttcgatcttagttccattaaaagcagtactaggctttatcctttcattaatggctacattaggtttcacaacattagtcattcaacatggctttatgggtagcttatttggtattgaaaacacaggaccattacttgcattccttccagtaatcacaattggattgttattcggacttgccatcgactacgagctcttcttaatgacacgtgtacatgaagaatacagtaagactggcgataatgatcattcaatccgtgtaggtatcaaagaaagtggacctgttatcgtagctgctgcacttattatgttcagtgtattcatcgcattcgtcttccaagatgacagtgcaattaagtcaatgggtatcgcattaggtttcggtgtgttattcgacgcattcgtcgtacgtatgacattaattccagcattgacgaaactctttggtaaagcttcatggtaccttcctaaatggttaggtgcagtattgccaaacgttgacgttgaaggtaaagctttagaagaagataatcatcacgacacatcttctgaaaaaggtcatgtcaacgataaaaatagtgaatactctagacaagacaaagataactatgtttatcaaaatgacaaacgtaactacaatcgcaattataatgacgaagattataaccgttctgtgcatttaaataatcatcatgaccagcatcatcgccaacatcaatatgataatcaacgtgatgatatcgactatgaatcactttatactcaagatggcgaccatactcatcatgatgaacgtaattataatgatcgacactatcaagacaattacgatagaaatgatgattatcgtcacaacaatcatgatcatcaaaatgataaccatgattatcatgattcaaattttgataaaacaacaaacttatacaaagaattaactgatagcaatattgatcaagatgtattattcaaagcattaatgttatacgctcgtgaaaacaacaaaggtgtttacgatagatataaccgatcatctcaacatcgtcatgatgacgaacttagagac

SEQ ID NO: 540 - DNA, 399 bp, Staphylococcus epidermidis
atgaataaaaaagtagaacatatcggtaaccaatatacgtcacaagaaaataagaaaaaacaacgacaaaaaatgaaaatgcgtgttgtacgtagacgtattgctttattcggaggtattcttttagcgattatcctcattctacttgtattgcttgtcattcaaagacataataacgatcaagatgcagttgaaaggaaagagaaagaaactgagtttcaaaaacaacaagatgaagaaattgctttaaaagagaaacttaataatttaaatgataaagactatatcgagaaaatagcgagagacgattattatttaagtaataaaggtgaagtcatttttagattacctgatgataaaaaatcctctcagtcaaagacttcaaacgaaaaaggcaat

SEQ ID NO: 541 - DNA, 375 bp, Staphylococcus epidermidis
atgaagatacgtttaacatttattatcttagcaatactatccaccatcggcttagtacttgttttagcaaaatatccaacaggcccacacacaatcaactataacgaaccttatacagtactcatagccattacgacaatagttataatggctttaccagcactcatattaggtatatttaatcatcttgcatgtagaatcatatcggcgatattacaaataagtgcactgatgatgtgggggtttttagtaatcattagcttaattatgggacaaattgtcattatgcttatggcttccttaacgatacttgcattacttgttagttctattgtcacactttcagtgcacccatctacttcagataaaataaat

SEQ ID NO: 542 - DNA, 1116 bp, Staphylococcus epidermidis
atgaataagaaactattgtggagcatcattggtattgtaattattgtcgtattaatcattgctgcttttatattaaaacaagttaatggttcaggtagtaaagatagtaatgcttacgatacatatacagtaagaaaagaaacacctattagtttagaaggcaaagcgtctccagaatctgtgaaaacttataacaataatcaatctgtgggtaacttcttaagtgtttcagtacaagatggtcaaacagttaaacaaggtgaacgtatcatcaattatgatacaaatgggaataaacgccaacaactattgaacaaagtgaatcaagcacaatctcaagttaatgatgattatcaaaaagtaaatcaaagtcctaacaatcatcaattacaagttaaattgactcaagatcaaagtgctttaaatgaagctcagcagtcattgtcacaatatgacagacaactcaatgacagcatgaatgcatcatttgatggtaaaattaacattaaaaatgattcagatgtaggcgaagggcaacctattttgcaattaatttcttcaaatcctcaaattaacgcaactattacagagtttgatattaataaaattaaagaaggcgatgaagtaaatgtcactgtaaatagcacaggtaaaaaaggaaaaggaaaaattcttaaaatagatgaacttcctacaagctatgatacaagtgacgatagtacagcatcatcggcacaagcaggggcacaaggtgatagtgaagaaggaactgaaatgacgacatctaatcctacaattaatcagccaacaggtggtaaaagtggcgaaacatcaaaatataaagttatcattggtgatttagatatacccgtgagatcaggcttctctatggatgctaaaatccctcttaaaactaaaaagctaccaaataacgtgttaacaaaagataataacgtatttgtcgttgataaaaataataaagttcacaaacgtgaaattaaaattgaacgtaataatggtgaaatcattgtgaaaaaaggattgaaatctggcgataaagtccttaaaagtccaaaaggtaatttaaatgatggagaaaaagtagaggtgtcatca

SEQ ID NO: 543 - DNA, 2019 bp, Staphylococcus epidermidis
atggctgaaactactaaaatatttgaatcacatttggtcaaacaggctctaaaagacagtgtattgaagctctatcctgtttatatgattaaaaatccgattatgtttgttgtagaagtgggcatgctgcttgccttaggattaaccatttatccggatttatttcaccaagaaagtgtatcacggctatatgtgttcagtatctttatcatattattactgacacttgtctttgcgaacttctctgaagcattagctgaaggtcgcggtaaagcacaagccaacgctttacgccaaacacaaactgaaatgaaggcacgtcgtattaaacaagacggcagttatgaaatgattgacgctagtgacctgaaaaaaggacatatcgtacgtgtcgcgacaggtgaacaaatcccaaatgacggtaaagttattaagggcctcgcaacagtggatgaatctgcgattacaggtgaatctgcacctgtaatcaaagaaagcggtggagatttcgataatgtaattggaggaacttctgtagcttcagactggttagaagttgagattacttcagaaccaggtcattcatttttagataaaatgattggtttggttgaaggggctacaagaaagaaaacacctaatgaaattgcgttatttactttattgatgacattaacgattatcttcttggtcgttattttaacgatgtatccattggcgaaattcctgaatttcaatttatccattgcgatgctgattgctttggctgtgtgtttaattccaacaaccattgggggattattatcggctatagggattgcagggatggatcgtgtgacacagtttaatatcttggctaaaagcggacgttctgtagagacttgtggtgatgtgaatgtcttgattttagataaaacaggtaccattacctacggcaaccgtatggcagatgcgtttattccggtgaaatcatcaagctttgaacgtttagttaaagcggcctatgaaagttctatcgcagatgacacaccagagggacgtagtattgtgaaattagcttataaacaacatatcgacttaccgcaagaggtcggagaatatattccgtttactgctgaaacacgtatgagcggtgtgaaatttacgacacgtgaagtatataaaggtgcaccgaatagtatggttaagcgtgtgaaagaagcagggggacatattccagttgatttagacgctcttgtcaaaggggtgtctaaaaaaggtggcacaccgctggttgtgcttgaagataatgagattttaggtgttatttatttgaaagatgtcattaaagatggactcgtagaacgtttccgtgaattacgtgagatggggattgaaacggtgatgtgtacaggagataacgaattgacagctgcgacaatagcgaaagaagcgggtgtggatcgctttgtggcagagtgtaaacctgaagataaaatcaatgtgattagagaagaacaagcgaaaggtcatattgttgcgatgacgggtgacggtacgaatgacgcgccagctttagcagaagctaatgtaggtttggcaatgaactcaggaaccatgagtgccaaagaagcggcgaatttaattgatttagattctaatccaaccaaactgatggaagtcgttctaattgggaaacaattattaatgacacgtggctcactcactacatttagtattgcgaatgacattgcgaaatactttgcgattttaccagccatgtttatggcggctatgcctgcgatgaatcatttgaatattatgcatctgcattcacctgaatcagcagtattatctgcgttaatctttaatgcgttgattattgtattattgattccgattgcgatgaaaggcgtgaaatttaaaggtgcctcaacgcaaaccatattgatgaaaaatatgttagtttacggcttaggcggtatgatcgtgccatttatcggcattaagctcattgatctcatcatccaactctttgtc

SEQ ID NO: 544 - DNA, 876 bp, Staphylococcus epidermidis
atgattgtgttacgtcgtctatttcaagatagaggtgccatatttgctatagctattattacaatctacgtagtgcttggagttttagctcctttaattacattctatgaaccgaatcacattgatacagcaaataaatttgctggtataagttggtctcactggttgggaacagaccatttaggtcgagatgtattaacacggataatatacgccataagacctagtttgttatatgtatttgtcgcattgattatttccgttgtgataggagcgatacttgggtttatttcaggttatttcccaggttatatcgatgcaataattatgcgtatatgcgatgtgatgttagcttttccaagctatgtggtcacattggcattgattacgttgtttggcatgggtgtagaaaatattattattgcatttatattgactcgatgggcgtggttttgtcgcgtgattcgaaccagtgtaatgcaatatattgaagctgatcatgtaaaatttgccaaagtaattggtatgaatgatttaacaatcattcgcaaacatattttgccactaacctttactgacatagcgattattgctagtagttcgatgtgttcaatgatattacaaatgtcaggattctcattccttggattaggtgttaaggcacctacagccgaatgggggatgatgcttaatgaagcacgaaaagtaatgttcacacatcctggaatgatgatgacaacaggtgtggctatcgtcataattgtgatggcgtttaactttttatcagatgctttacaaatggcgattgatcctcgtatgtccgctaaagaaaaacgactggctctgaagaaaggtgtgaaagcacgtgacactgct

SEQ ID NO: 545 - DNA, 1188 bp, Staphylococcus epidermidis
atgaaaggtgccatgtcttggccttttttaagattatatattttaacattgatgttttttagtgcgaatgccatactcaatgttttcatacctctaagaggacatgacttgggggcgacgaatactgtaattggaattgtaatgggagcttatatgctaacggcaatgctatgtcgcccctgggctggtcaaattattgcacgtattggtccgattaaagtattgcgtattatattattgattaatgctatggcactggtattatatgggtttacaggacttgaaggttatttgattgcacgtatcatgcaaggtgtgtgtacggcattcttctcaatgtctttacaattgggtattatagatgctttacctgagaaatatcgttcagaaggtgtatctctctattcattattttcaacgattcccaatttattaggaccattaattgcagttgggatttggcacgtggaaaatatgtccatatttgctattgttatgatttttattgcagtaacaacaaccttatttggttatagaactacttttgcaaatacacaaaaagaggtatcaccaaaagacgaagtcttgccttttaatgcaatgactgtatatgtccaattttttaaaaataaagcactcttctgcagtggtatgattatgatcttgtcatctatcgtgtttggtgcgatgagtacttttataccattatatacggttagggaaggtttcgcgaatgcaggtattttcctcacaattcaagccattacagtagtgatagctagattttatttacgtaagtatgtaccatctgatggtttatggcatcaccgttttatgatgattgtcttaacgttactgatggttgcttcagtcattgtagcttttggaccacatatagtgagtatatttgtatatataagtgcaatctttatcggaataacacaagcgctcgtttatcctacattgacaacgtatttaagttttgtcttaccaaagataggacgtaatatgttattaggattgtttatagcatgtgcagatttagggatttcactaggaggtgtgctaatggggccaatatcagatacggtaggatttaaatggatgtatattttatgcgctttattggttactattgcaatgacactaagtaaaattagacaaagacaaagtgtttcaaaagcctca

SEQ ID NO: 546 - DNA, 1416 bp, Staphylococcus epidermidis
gtgggaagtactgttaaatatcgtaagtttattctacctattgtcgttggtttaattatctgggcattgacgcctattaaaccagatgccttaaatgatcaagcttggtttatgtttgctatttttgtgtcaaccatcattgcttgtattacccaacctatgactataggtgcagtatcaatcattggttttacaatcatgattttggttggaattgttgatacaaaaactgccgttcaaggcttcggtaatagtagtatttggcttattgcaatggcctttttcatttcaagaggatttgtaaaaacagggctaggtcgacgtattgctctgcaattcgttaaattatttggaaagaaaacgcttggtttggcttattcacttgttggtgttgatcttatcttagctcctgctacgccaagtaatacagcacgtgctggtggtattatgtttccaatcattaagtccttgtcagagtcatttggttcatcgccgagagatggttctgagagaaaaatgggtgcgtttttaatctttactgagttccaaggtaatttaattacttcagctatgtttttaacagctatggccggtaaccctatagcgcaaagtttagctgaaaaaacggcacacgttcaaattacatggatgaattggtttgttgctgctattatacccggattgatttctctcatcgttgtccctttcattatttataaattatacccaccaactgttaaagaaacgcctaacgctaaaaaatgggctactgaacaactagaagaaatgggacatatgtctatagccgaaaaattgatggttggtatctttatcatagcattggctttgtgggtattaggaagcttcattaatgttgatgccacgctcactgcatttattgctttagcattgttactattaacaggtgtattagcgtggtcagatattttaaatgaaacaggcgcatggaatacactcgtttggttctcagttcttgtattaatggcagaacaattaaacaagttaggctttatcccatggttaagcaaactcattgctcaaggtttaaatggctttagttggcctatcgttttagttttactcatcttgttttatttctactcacattatttattcgcaagtgcaacagcacatgtcagcgccatgtacgccgcgttactcggtgttgcagtcgcttcgggtgcaccgccattattcagtgcattaatgttagggttctttggtaacttactggcatcaacaacacactatagtagtggaccagcgcccatattatacgcagctggctatgttacacaaaagcgctggtggactatgaatattgtacttggtatagtctattttattatttggattggtgtaggttcactatggatgaaactcataggtatgatg

SEQ ID NO: 547 - DNA, 1173 bp, Staphylococcus epidermidis
atgaaagataataaaatgttgttcattatttttatgataggaacatttacagtaggaatggctgaatatgtagtgacaggattacttacacaaatcgctgacgatatgaaggtttctatttcgagtgcaggtttattaattagtgtttatgctattagtgttgcattgatagggcctttaatgcgaatcataacattgaaagttcacgcccaccgtctgttaccgattttagtagcgatttttataataagtaatttagtgggaatgttagcaccgaattttaatgtattgttattatcaagactcatgtctgcggcaatgcatgcgccattcttcggtgtgtgtatgagtgttgctgcgacagtcgcacctcctgctaaaaaaacacaggccattgcacttgttcaggcaggtttaactattgctgtaatgttaggtgtaccattcggatcatttttaggtggctttgcaaattggagagttgtttttggatttatgattgtgttggcaatcattactatgttaggaatgattaaatttgttccaaatgtttctttaagtgcagaagcaaatattagcaaagaattaacagtgtttaagaatccacacattttaattgtgattgcaattattgtgtttggttactctggtgtgtttactacttatacatttatggagccaatgatacgagatttttctccatttaaaattgtaggtttaactgtttgtttatttatgtttggtctaggcggtgtgatagggaatttaattactggtaatgtaccggaagataaattaacaaaaaatttataccttacatttcttttactatttgtaacaatcatactatttgttactgttattcaaaattcaatattagcattaatcatttgcttcttattcggttttggtacatttggtacaaccccgttacttaatagcaaaattatcttaagtggaaaagaagcaccacttcttgcaagtacgttagcagcttctattttcaatgttgctaattttcttggtgcaataattggatctatattattatcaatagggttaccttacattcaaattactttgatatctggtggaattatagtgttgggtatgcttcttaatcttgttaatcaactttatgaaaagaaacatatcacatttaatgaatattca

SEQ ID NO: 548 - protein, 55 aa, Staphylococcus epidermidis
QVLKMLQNILLLMLLLLMLKIKVLIYLIMTLLNQFRDMVLKLRFINNKSLWAIEN

SEQ ID NO: 549 - protein, 52 aa, Staphylococcus epidermidis
KRLVMQQHLQFNLPKIILLNALTKRFLSLLVTQLVMVFILVVSLLKVPVQLQ

SEQ ID NO: 550 - protein, 32 aa, Staphylococcus epidermidis
LRLRQFQLLCTLVLLMLVALFLHAFLRYLMTK

SEQ ID NO: 551 - protein, 29 aa, Staphylococcus epidermidis
RLRYTSYIIKLAATDAFKLLTCPTIGILI

SEQ ID NO: 552 - protein, 70 aa, Staphylococcus epidermidis
SSVFAIRLTITFSRFSNVGCKKHIKGAIIMKKEIIEWIVAIIVAIVIVTLVQKFLFASYTVKGASNVIYH

SEQ ID NO: 553 - protein, 31 aa, Staphylococcus epidermidis
RSVPHIVVLTMRIIASVLLVIVGFSLSVSCA

SEQ ID NO: 554 - protein, 97 aa, Staphylococcus epidermidis
TANNIISFIITLTNIYKTKLMGYFFNIIELRNKFIRRCWAILFIAIIHFISECFLPHIPTNCYVSRFDFLDSAKNMSYKTLNTICRNSFRIVHKLIV

SEQ ID NO: 555 - protein, 37 aa, Staphylococcus epidermidis
FFCRLTQLNWLKYLSVRMLYMYFMIFSIMNHIVSTIC

SEQ ID NO: 556 - protein, 31 aa, Staphylococcus epidermidis
IFISTCGCSTTSAWKAEVLPLRVRFPSPAPF

SEQ ID NO: 557 - protein, 44 aa, Staphylococcus epidermidis
LKNILRIVFIAGLTVFFSGPGQTYSNAAFIDEYIQTFGWSRTEV

SEQ ID NO: 558 - protein, 51 aa, Staphylococcus epidermidis
RNSNQMYQTFTADIVLIFMIIVLGGLVVQVPMPILAGIMVMVSETIYCLHL

SEQ ID NO: 559 - protein, 17 aa, Staphylococcus epidermidis
NQRLEETISSPHHSSAL

SEQ ID NO: 560 - protein, 433 aa, Staphylococcus epidermidis
MKQFLNITQRKFIEWLIILSIFIVSIPNKWTLMISIALSLLLLKRGALGVVQLIILYMLRSQIYTPYDTQEMAHYIVSMKYILIYVIGVFFLFKYVKHWIRNEMILRFIKSTMILMLLYIIMSLVVSNDPIESILKLLNFFIPLILIVMYVSLIKKIKNLINWINQFITLVIAFTFLFIVIAPKSYLIDEESLRSVFKDAHSFAVILAMGLVLYMVTIIKQQDYDVFNLLLLNIGMIELYLSNSRHIFISVILCLMLLLPLSHIKKRIKHPIIGAMILMAIAIINQPYIYHLFIKLILKGKNSQEVFMPSDMNIKAIDYALTEHPFLGSGFGIPMIKASSEIQYFNVATSNIIFGMIIFTGIIGLTLCTIYMLHMVLLVTFPMSITILLFLITIFVNMDYIILFDSVGLGILCYIFWGIYLKEGMYQYNNGQW

SEQ ID NO: 561 - protein, 369 aa, Staphylococcus epidermidis
MTNQKTVGLVVAPGVTERLAENLIQEMPKMLSTHYDHQQEWIFDLVTDPLTGFAESVDEIFGKVADYHDKRQWDYVIAITDLPMFADKQVMALDINMENGAAIFSYPAFGWRPVKKRFKHAIYNIIQELNEAEQESRNYDNNKQIENSVKKQFPLSKIDKETIYMKETDSYHLRYLSSSRSRGMFRLVSGMTFANNPLNMMASLSNIVAIAFTTGAFGLVFTTMWQMAYNFSMWRLFGISIIAIIGMLIWIMMSHDLWEPVNKSNHKHITWLYNLTTIMTLIFAIIIYYIILYLLFLIAEIVLLPSGFLGQQVGLKGPAGIDLYLSIPWFAASISTVAGAIGAGLLNDELIKESTYGYRQRVRYEEQRR

SEQ ID NO: 562 - protein, 249 aa, Staphylococcus epidermidis
MKFCPHCGNPIKKEQSFCNKCGKHLKTSTQRKSENQIEHMREQQSYISREERQHHDSTFYKEQKHTGWLIVLSIIFVLLIAALLYGAYYAYNHYISDEQSHQTTESQQSNESDQNRDQSTGPSIDVFSDDFDQGYMKSASTSGYRGVYNGMTREEVEDKFGTSNGSVESLKWSYETYGDLAVAYDDNEVVSVGVAPNHISEDQFLSMYNEPDDRNSSQLIYDSNKDNDFSVLANVKNGDVTVIENVNQI

SEQ ID NO: 563 - protein, 432 aa, Staphylococcus epidermidis
MLLFIIEIIIMILAILLGLRTAGALGCGIFAIVAQLIMIFGFQLPPGSAPVTAVLIILSIGIAGGTLQATGGIDYLVYIASRVIERFPKSIIFIAPMIVFVFVFGIGTANIALSLEPIIAKTAQKARIQPKRALTASVLTANLALLCSPAASATAYIISVLAGYEISMGKYLSIVLPTALISMLMLSTFCTFVGRKEHVRDESERLVQMPEVEIKNDFSLKVKIGVISFLLCVMGILTFGIFPNLMPQFNVNGDVVKVEMTEIVQFFMYLSATINLLLIKINTSDILSSNITQSAMGALFAVLGPGWLGATIFNAPHNLKILKNDIGSIISEVPWLVIILVSVVAMIVISQTATASIMVPIVMSLGIPPIYFVAMVQTLNVNFVIPAQPTLLFAVELDETGRTRPTSFMIPGFFVITVSVITGFVIKTILGY

SEQ ID NO: 564 - protein, 483 aa, Staphylococcus epidermidis
MGSFFNRMTRKENPTIYQNKDGHLKRTLRVRDFLALGVGTIVSTSIFTLPGVVAAEHAGPAVALSFLLAAIVAGLVAFTYAEMASTMPFAGSAYSWINVLFGELFGWVAGWALLAEYFIAVAFVASGFSANLRGLIAPLGISLPKSLSNPFGSNGGVIDIIAAVVIILTALLLSRGMNEAARMENVLVILKVLAIILFVIVGLTAINFSNYIPFIPEHKVTETGDFGGWQGIYAGVSMIFLAYIGFDSIAANSAEAINPQKTMPRGILGSLIVAIVLFVAVALVLVGMFHYSQYADNAEPVGWALRESGHGIIAAIVQAISVIGMFTALIGMMLAGSRLLYSFGRDGLLPSWLSQLNHKHLPNRALVILTIIGVVIGSMFPFAFLAQLISAGTLVAFMFVSLAMYRLRKREGKDLPKPEFKLPLYPILPAITFILVLLVFWGLSFEAKLYTLIWFIVGIIIYLIYGIRHSKKNDEEAYQVPRE

SEQ ID NO: 565 - protein, 357 aa, Staphylococcus epidermidis
MTKKKRLSPSEWLLKQSKRHKRKNTLYTAIVLLVALVLLIFAVKSIQVEPVKSDTRDKDSIRITYLGNVTLNKHIRQTNLNDVFKGIQDTLDHSDFSTGSLIVNDFSRNQKDNINKNIENIMFLRKHNVKSVNLINESMDNIQATAMMRKIDSQAGYNFLTGNGSNPINSKTVQQDIKGKKIANVSFTDIESNYTNSLKNTTSISLDPAIFYPLIKKLKENNDYVVVNVDWGIPNERNVTTRQKEYAHALANAGADVIIGHNTVIQKVENYKRTPIFYSLGNTTSDNFLSKNQKGMIVQQDWKGSHNQFHITPIQSKDGKISKDNMNKMDHIRFKNNIKDKSIDLKSDQNGGYTFEY

SEQ ID NO: 566 - protein, 233 aa, Staphylococcus epidermidis
MIEHLGINTPYFGILVSLIPFVIATYFYKKTNGFFLLAPLFVSMVAGIAFLKLTGISYENYKIGGDIINFFLEPATICFAIPLYRKREVLKKYWLQIFGGIAVGTIIALLLIYLVAITFQFGNQIIASMLPQAATTAIALPVSDGIGGVKELTSLAVILNAVVISALGAKIVKLFKISNPIARGLALGTSGHTLGVAAAKELGETEESMGSIAVVIVGVIVVAVVPILAPILL

SEQ ID NO: 567 - protein, 233 aa, Staphylococcus epidermidis
MKRTDKYRDSYKYDDQYQNHRKRSEEDMYRQHQESQQRANSNRATQSENDREYENHPERYYNGRDYRREQQLEEENEKSSKTKKWLIAIIVILLIIVAIFITRAIINHNNDKVSNDPNVSQNYKKEVENQNDDINRQVDSAKSDIKNKKDTQSQIDKLQNQIDQLKQNEETNADSKFTKFYQNQIDKLKNANNAQLNNENQSKVNNMLEDINTKFDSIKAKLENILNGSNSGN

SEQ ID NO: 568 - protein, 116 aa, Staphylococcus epidermidis
MKNKKGLGIGLITIMIIVCIVLVIMMFVGGKKESYYGIMKDSTTIDKMINTKNEKIEKNVELPKDANVSVKKEDFVMLFKDEKTGKITKVKKVNHDDVPHGLMSKIHDMGNMKHGM

SEQ ID NO: 569 - protein, 214 aa, Staphylococcus epidermidis
MAMSLLVSLVVYMMTLTSDILEDILSFKLEVIMQFPYILSSISLIILFILFILKDMEKIWYWLISIVMIAVISMSGHVWSQQVPLWSIIIRTIHLIGLTLWLGSLVYLICYAIKVKINQLTSVRRMLLKVNIIAVIMLVFTGILMAIDETNTLTLWNNVSAWSIYLVIKIAGIIAMMLLGFYQTMRALRQRQQVHRFALMTELLIGMILILQVS

SEQ ID NO: 570 - protein, 382 aa, Staphylococcus epidermidis
MKNSRFSGFQWAMMVFVFFVITMALSVILRDFQATIGVKRFVFSIKDLAPFIAAIVCILVFKHRKEQLAGLKFSISLKVIERLLLALILPLIILMIGLFSFNTYADSFILLQTSDLSVSLLTILIGHILMAFVVEFGFRSYLQNILETRMNTFFASIVVGLIYSVFTANTTYGVEYAGYHFLYTFMFSMIIGELIRATNGRTIYIATAFHASMTFALVFLFSEETGDLFSMKVIALSTTIVGVSFIIISLIIRAIVYKTTKQSLDEVDPNNYLSHIQDEEPSQEDASSTSNHDVSSKDETKQQDIDNDKHQSKKPNKSDDALTTSNYKEDASSVNKETDTTHNDNIKDHSTYTEDRHSSVVNDVKDEIHEVEDHKADTDKSH

SEQ ID NO: 571 - protein, 458 aa, Staphylococcus epidermidis
MENNELQRGLNARQMQMIALGGTIGVGLFMGATSTIKWTGPSVILAYLIAGIFLFLIMRAMGEMIYINPTTGSFATFASDYIHPAAGYMTAWSNVFQWVVVGMSEVIAVGEYMNYWFPSLPNWIPGVIAVLFLMAANLVSVKAFGEFEFWFALIKVVTIVLMIIAGLGLILFGIGNGGNPIGISNLWSHGGFMPNGFIGFFFALSIVIGSYQGVELIGISAGETKNPQTNIVKAVNGVIWRILIFYIGAIFVIVSVYPWNQLGSIGSPFVATFAKVGITFAAGLINFVVLTAALSGCNSGIFSASRMIYTLAKKGQMPKVFTKVMKNGVPFYTVFAVSMGILIGALLNVILPLIIDGADSIFVYVYSASILPGMIPWFMILFSHLRFRRLHPEKVHNHPFKMPGGAIANYLTIMFLLLVLVGMLLNKETVVSVVIGIVFLTAVTLYYLIRYHKKERQI

SEQ ID NO: 572 - protein, 485 aa, Staphylococcus epidermidis
LQDFDNLIPGWFKTFVQVGNDLIWSQYLIGLLLTAGFFFTISSKFIQLRMLPEMFRALTEKPETLSSGEKGISPFQAFAISAGSRVGTGNIAGVATAIVLGGPGAVFWMWIIAFIGAASAFMEATLAQVYKVHDKEGGFRGGPAYYITKGLNQKWLGIVFAVLITVTFAFVFNTVQANTIAESLNTQYNISPVITGIVLAVITGIIIFGGVRSIATLSSLIVPIMAIVYIGMVLIILLLNIDQIVPMIGTIIKSAFGVQQVTGGAVGAAILQGIKRGLFSNEAGMGSAPNAAATSAVPHPVKQGLIQSLGVFFDTMLVCTATAIMILLYSGLQFGDSAPQGVAVTQSALNEHLGSAGGIFLTVAVTLFAFSSVVGNYYYGQSNIEFLSNNKMILFIFRCFVVLLVFVGAVAKTETVWSTADLFMGLMAIVNIISIIGLSNIAFAVMKDYQRQRKEGKRPVFKPENLEINLFGIETWGQHAKMPKK

SEQ ID NO: 573 - protein, 191 aa, Staphylococcus epidermidis
LKKEILEWIVAIAVAIALIAIITKFVGKSYSIKGDSMDPTLKDGERVVVNIIGYKLGGVEKGNVIVFHANKKDDYVKRVIGTPGDSVEYKNDTLYVNGKKQSEPYLNYNEKRKQTEYITGSFKTKNLPNANPQSNVIPKGKYLVLGDNREVSKDSRSFGLIDKDQIVGKVSLRYWPFSEFKSNFNPNNTKN

SEQ ID NO: 574 - protein, 361 aa, Staphylococcus epidermidis
MFNKVWFRTGIFFIMLFILIKLFMEVHEVFAPIATIIGSVFLPFLISGFLFYICLPFQNILEKWGFPRWASITTIFIGLIAIIAIVVSFIAPIIISNINNLIKQTPSLQKEAEQLINFSLRQMDKLPDDVTHRINKAVKSMGDGATSILSNSVSYITSFISTVFLLIMVPFFLIYMLKDHEKFIPAIGKFFKGERKVFVVDLLKDLNFTLKSYIQGQVTVSIILGIILYIGYTIIGLPYTPLLVLFAGVANLIPFLGPWLSFAPAAILGIIDGPSTFIWVCVVTLIAQQLEGNVITPNVMGKSLSIHPLTIIVVILAAGDLGGFTLILVAVPLYAVIKTLVSNIFKYRQRIVDKANSNVKD

SEQ ID NO: 575 - protein, 96 aa, Staphylococcus epidermidis
MNTIVKHTVGFIASIVLTLLAVFVTLYTNMTFHAKVTIIFGFAFIQAALQLLMFMHLTEGKDGRLQSFKVIFAIIITLVTVIGTYWVMQGGHSSHL

SEQ ID NO: 576 - protein, 383 aa, Staphylococcus epidermidis
MLGEQYTQIKRPANRLTEKILGWFSWVFLLILTIVSMFIALVSFSNDTSIANLENTLNNNELVQQILANNDLSTTQFVIWLQNGVWAIIVYFIVCLLISFLALISMNIRILSGLLFLIAAIVTIPLVLLIVTLIIPILFFIIAMMMFARRDRIETVPSYYNEYDQPYYDERGFYEPESRNEHGYNDDVYEPMHTKKEDRNTRRQFNRNAQQQDSYNGITDNQPDEDTSSDQLYSDEYVDNEDKYSQFPKRAVESEYASQQTEDEPTVMSRQAKYNKKSKNTDFEDAQQEHMEGNQFDDVGVVEPQIDPKELKAQRKREKAEIRAKKKEKRKAYNKRMKERRKNQPSAVNQRRMNYEERRQMINNEQEDTDNNLNQQEDSKKEN

SEQ ID NO: 577 - protein, 463 aa, Staphylococcus epidermidis
MEENKNQPNNENMSNKDDNTIHLNDSQSNEDLELFRRNKNARQRRRRRIDNQSKEKDATSTQSQLETKPMDKFIDNHKSHNQDKEIKSDLIEDNVNDEDDNQKYNNDKLNDRSVQQTSETRQSNEDEEEFLTDHQSEKQTKDSRHSKKHKLLSKFTSKKEKETFTSFNSNEKVTQIKPLSLEEKRAIRRKKQKRIQYTIITLLILIIVLILLYMFTPLSKISNVNIKGNNNVSTSKIKKELNVTSRSRMYTFSKNKAIRNLKQNPLIKEVDIHKQLPNTLTVNVTEYQIVGLEKNKDKYVPIIEDGKELTEYKDEVSHDGPIIDGFKGDKKTRIIKALSEMSPKVRNLIAEVSYAPTKNKQSRIKIFTKDNMQVIGDITTIADKMQYYPQMSQSLSRDDSGELKTNGYIDLSVGASFIPYQGSSTVQSGTEQNVTKSTQEENDAKEELQNVLNKINKQSKENN

SEQ ID NO: 578 - protein, 485 aa, Staphylococcus epidermidis
MKCLFKMLSIIIIMLSTFTLFISPSTYANEDENWTKIKNRGELRVGLSADYAPLEFEKTIHGKTEYAGVDIELAKKIAKDNHLKLKIVNMQFDSLLGALKTGKIDIIISGMTTTPERKKEVDFTKPYMITNNVMMIKKDDAKRYQNIKDFEGKKIAAQKGTDQEKIAQTEIEDSKISSLNRLPEAILSLKSGKVAGVVVEKPVGEAYLKQNSELTFSKIKFNEEKKQTCIAVPKNSPVLLDKLNQTIDNVKEKNLIDQYMTKAAEDMQDDGNFISKYGSFFIKGIKNTILISLVGVVLGSILGSFIALLKISKIRPLQWIASIYIEFLRGTPMLVQVFIVFFGTTAALGLDISALICGTIALVINSSAYIAEIIRAGINAVDKGQTEAARSLGLNYRQTMQSVVMPQAIKKILPALGNEFVTLIKESSIVSTIGVSEIMFNAQVVQGISFDPFTPLLVAALLYFLLTFALTRVMNFIEGRMSASD

SEQ ID NO: 579 - protein, 531 aa, Staphylococcus epidermidis
MSHKILVSDPISEDGLQSILKHPEFDVDIQTDLSENDLVNMISTYDALIVRSQTQVTERIINAATNLKVIARAGVGVDNINIEAATLKGILVINAPDGNTISATEHSVAMLLAMARNIPQAHQSLRNKEWNRKAFRGVELYGKTLGVIGAGRIGLGVAKRAQSFGMKILAFDPYLTEDKAKSLDIQIATVDEIAEKSDFVTVHTPLTPKTRGIVGSSFFNKAKQNLQIINVARGGIIDETALIEALDNNLIDRAAIDVFEHEPPTDSPLIQHDKIIVTPHLGASTVEAQEKVAVSVSEEIIEILTKGNVEHAVNAPKMDLSKVDKTTQSFIGLSTTIGEFAIQLLDGAPSEIKVKYAGDLAQNDTSLITRTIITNILKEDLGNEVNIINALAILNQQGVTYNIEKQKKHSGFSSYIELELVNDQDKIKIGATVFAGFGPRIVRINDYSLDFKPNQYQLVTCHKDKPGIVGQTGNLLGSHGINIASMTLGRNDAGGDALMILSIDQQASEEVIKILNETSGFNKIISTKLTI

SEQ ID NO: 580 - protein, 355 aa, Staphylococcus epidermidis
LKRNFINNLIILLIAIMLSLLLKMLHVILPFMFGPILAALLCVKVLKLKIRWPFWLSQIGLILLGVQIGSTFTQQVIKDISKNWLTIVFVTILLILLALIIAFFFKKIAQVNLETAILSVIPGALSQMLVMAEENKKANILVVSLTQTSRVIFVVILVPLISYFFQDNHHEMNHTTMEVPTLSQTLNIWQIIILFSMVGIIYIGMSKINFPTKQLLAPIIVLIIWNMTTHLTFSLDHWLLATAQLIYMIRIGLQIANLMSDLKGRIAIAIAFQNIMLIVTTFIMIIGIHLITNESINELFLGAAPGGMSQIVLVAMATGADVAMISSYHIFRIFFILFVIAPLIGYFINVKLNNK

SEQ ID NO: 581 - protein, 763 aa, Staphylococcus epidermidis
VKKTSRIIAFILLIALLFTGMGMTYKNVVKNVNLGLDLQGGFEVLFQVDPLNKGDKIDKKALQATSQTLENRVNVLGVSEPKIQIEDPNRIRVQLAGIKDQAQARKLLSTQANLTIRDAEDHVLMSGSDIKQGSAKQEFKQETNQPTVTFKVKSKDKFKKVTEKISKKRDNVMVVWLDFEKGDSYKKEAKKQQEGKKPKFISAASVDQPINSSSVEISGGFNGKKGVEEAKQIAELLNAGSLPVDLKEIYSNSVGAQFGQDALDKTMFASIVGIALIYLFMLGFYRLPGLVAIIALTTYIYLTLVAFNFISGVLTLPGLAALVLGVGMAVDANIIMYERIKDELRIGRTLKQAYSKANKSSFLTIFDSNLTTVIAAAVLFFFGESSVKGFATMLLLGILMIFVTAVFLSRGLLSLLVSSNFFKKQYWLFGVKKKDRHDINEGKDVHDLKTSYERLNFVKLAKPLISLSILIVIIGLIIISIFKLNLGIDFSSGTRADIQSKNAITQAQVEKTVKSVGLEPDQIQINGSGNKNATVQFKKDLSREEDNKLSAKVKSEFGDNPQINTVSPLIGQELAKNAVTALILASIGIIIYVSLRFEWRMGLSSVLALLHDVFIIIAIFSLFRLEVDLTFIAAVLTIVGYSINDTIVTFDRVRENLHKVKVITHTDQIDDIVNRSIRQTMTRSINTVLTVVVVVVAILILGAPTIFNFSLALLIGLLSGVFSSIFIAVPLWGMLKKRQFKKTKNNKLVVHKEKKSNDEKILV

SEQ ID NO: 582 - protein, 414 aa, Staphylococcus epidermidis
MGENTKQDFNQKGQNFKFTKKHRRLLYGSVFLMATSAIGPAFLTQTAVFTAQFYASFAFAILISIIIDIGAQINIWRILVVTGLRGQEISNKVLPGLGTIISILIAFGGLAFNIGNIAGAGLGLNAMFGLDVKWGAAITAIFAILIFVSRSGQKIMDVISMILGIVMILVVAYVMVVSNPPYGDALVHTFAPEHPFKLILPIITLVGGTVGGYITFAGAHRILDSGIKGKSYLPFVNRSAVAGILTTGVMRTLLFLAVLGVVVTGVTLSSENPPASVFQHALGPIGKNIFGVVIFAAAMSSVIGSAYTSATFLKTLHKSLLNKNNLIVITFIVISTFVFLFIGKPVSLLIIAGAINGWILPITLGAILIASRKKSIVGNYQHPTWMLVFGIIAVIVTIMTGIFSLQDLASLWKG

SEQ ID NO: 583 - protein, 460 aa, Staphylococcus epidermidis
VSNNNFKDDFEKNRQSINPDEHQTELKEDDKTNENKKEADSQNSLSNNSNQQFPPRNAQRRKRRRETATNQSKQQDDKHQKNSDAKTTEGSLDDRYDEAQLQQQHDKSQQQNKTEKQSQDNRMKDGKDAAIVNGTSESPEHKSKSTQNRPGPKAQQQKRKSESTQSKPSTNKDKKAATGAGIAGAAGVAGAAETSKRHHNKKDKQDSKHSNHENDEKSVKNDDQKQSKKGKKAAVGAGAAAGVGAAGVAHHNNQNKHHNEEKNSNQNNQYNDQSEGKKKGGFMKILLPLIAAILILGAIAIFGGMALNNHNDSKSDDQKIANQSKKDSDKKDGAQSEDNKDKKSDSNKDKKSDSDKNADDDSDNSSSNPNATSTNNNDNVANNNSNYTNQNQQDNANQNSNNQQATQGQQSHTVYGQENLYRIAIQYYGEGTQANVDKIKRANGLSSNNIHNGQTLVIPQ

SEQ ID NO: 584 - protein, 518 aa, Staphylococcus epidermidis
MAKGDQYQAHTEKYHDKKSKKSYKPVWIIISFIILITILLLPTPAGLPVMAKAALAILAFAVVMWVTEAVTYPVSATLILGLMILLLGLSPVQDLSEKLGNPKSGDIILKGSDILGTNNALSHAFSGFSTSAVALVAAALFLAVAMQETNLHKRLALLVLSIVGNKTRNIVIGAILVSIVLAFFVPSATARAGAVVPILLGMIAAFNVSKDSRLASLLIITAVQAVSIWNIGIKTAAAQNIVAINFINQNLGHDVSWGEWFLYAAPWSIIMSIALYFIMIKFMPPEHDAIEGGKELIKKELNKLGPVSHREWRLIVISVLLLFFWSTEKVLHPIDSASITLVALGIILMPKIGVITWKGVEKKIPWGTIIVFGVGISLGNVLLKTGAAQWLSDQTFGLMGLKHLPIIATIALITLFNILIHLGFASATSLASALIPVFISLTSTLNLGDHAIGFVLIQQFVISFGFLLPVSAPQNMLAYGTGTFTVKDFLKTGIPLTIVGYILVIVFSLTYWKWLGLV

SEQ ID NO: 585 - protein, 278 aa, Staphylococcus epidermidis
MLDFINHLLSYQFLNRALITSILVGIVCGTMGSIIVLRGLSLMGDAMSHAVLPGVALSFLFNIPMFIGALVTGMLASLFIGFITSNSKTKPDAAIGISFTAFLASGVIIISLINSTTDLYHILFGNLLAITHQSFWTTIVITVLVILLIIIFYRPLMISTFDATFSRMSGLNTTLIHYFVMLLLALVTVASIQTVGIILVVALLITPASTAFLISKQLYAMMVIASIISVISSIIGLYFSYIYNIPSGATIVICTFMIYIVTLSITRIKNKQKRSALT

SEQ ID NO: 586 - protein, 893 aa, Staphylococcus epidermidis
LAKLLYKLGKFIAKNKWLSVIGWLVILGVIITPLMINSPKFDSDITMNGLKSLDTNDKISKEFHQDSEKASMKIVFHSNKNDGLNNKDTKKDIEDALDNIRQNDDYIQNISNPYDSGQVNDEGDTAIANVSYVVPQTGLKDSSKHIIDKELKDVTDNHNVQIEKTQGGAMNSEPGGTSEIVGIIVAFVILLITFGSLIAAGMPIISAIIGLGSSVGIIALLTYIFDIPNFTLTLAVMIGLAVGIDYSLFILFRFKELKKKGVDTVEAIATAVGTAGSAVIFAGLTVMIAVCGLSLVGIDFLAVMGFASAISVLFAVLAALTLLPALISIFHKSIKIKDKPTKSKDPKDHSWAKFIVGKPVIAVIVSLIILILAAIPVSGMRLGIPDDSLKPTDSSEYKAYKLISDNFGEGYNGQIVMLVNTKDGGSKSTIERDLNNMRSDLEDIDNVDTVSKAQLTDNNNYALFTIIPEKGPNSQSTENLVYDLRDYHSQAQEKYDYGTEISGQSVINIDMSEKLNNAIPVFAGVIVVLAFFLLMIVFRSILVPLKAVLGFILSLMATLGFTTLVIQHGFMGSLFGIENTGPLLAFLPVITIGLLFGLAIDYELFLMTRVHEEYSKTGDNDHSIRVGIKESGPVIVAAALIMFSVFIAFVFQDDSAIKSMGIALGFGVLFDAFVVRMTLIPALTKLFGKASWYLPKWLGAVLPNVDVEGKALEEDNHHDTSSEKGHVNDKNSEYSRQDKDNYVYQNDKRNYNRNYNDEDYNRSVHLNNHHDQHHRQHQYDNQRDDIDYESLYTQDGDHTHHDERNYNDRHYQDNYDRNDDYRHNNHDHQNDNHDYHDSNFDKTTNLYKELTDSNIDQDVLFKALMLYARENNKGVYDRYNRSSQHRHDDELRD

SEQ ID NO: 587 - protein, 133 aa, Staphylococcus epidermidis
MNKKVEHIGNQYTSQENKKKQRQKMKMRVVRRRIALFGGILLAIILILLVLLVIQRHNNDQDAVERKEKETEFQKQQDEEIALKEKLNNLNDKDYIEKIARDDYYLSNKGEVIFRLPDDKKSSQSKTSNEKGN

SEQ ID NO: 588 - protein, 125 aa, Staphylococcus epidermidis
MKIRLTFIILAILSTIGLVLVLAKYPTGPHTINYNEPYTVLIAITTIVIMALPALILGIFNHLACRIISAILQISALMMWGFLVIISLIMGQIVIMLMASLTILALLVSSIVTLSVHPSTSDKIN

SEQ ID NO: 589 - protein, 372 aa, Staphylococcus epidermidis
MNKKLLWSIIGIVIIVVLIIAAFILKQVNGSGSKDSNAYDTYTVRKETPISLEGKASPESVKTYNNNQSVGNFLSVSVQDGQTVKQGERIINYDTNGNKRQQLLNKVNQAQSQVNDDYQKVNQSPNNHQLQVKLTQDQSALNEAQQSLSQYDRQLNDSMNASFDGKINIKNDSDVGEGQPILQLISSNPQINATITEFDINKIKEGDEVNVTVNSTGKKGKGKILKIDELPTSYDTSDDSTASSAQAGAQGDSEEGTEMTTSNPTINQPTGGKSGETSKYKVIIGDLDIPVRSGFSMDAKIPLKTKKLPNNVLTKDNNVFVVDKNNKVHKREIKIERNNGEIIVKKGLKSGDKVLKSPKGNLNDGEKVEVSS

SEQ ID NO: 590 - protein, 673 aa, Staphylococcus epidermidis
MAETTKIFESHLVKQALKDSVLKLYPVYMIKNPIMFVVEVGMLLALGLTIYPDLFHQESVSRLYVFSIFIILLLTLVFANFSEALAEGRGKAQANALRQTQTEMKARRIKQDGSYEMIDASDLKKGHIVRVATGEQIPNDGKVIKGLATVDESAITGESAPVIKESGGDFDNVIGGTSVASDWLEVEITSEPGHSFLDKMIGLVEGATRKKTPNEIALFTLLMTLTIIFLVVILTMYPLAKFLNFNLSIAMLIALAVCLIPTTIGGLLSAIGIAGMDRVTQFNILAKSGRSVETCGDVNVLILDKTGTITYGNRMADAFIPVKSSSFERLVKAAYESSIADDTPEGRSIVKLAYKQHIDLPQEVGEYIPFTAETRMSGVKFTTREVYKGAPNSMVKRVKEAGGHIPVDLDALVKGVSKKGGTPLVVLEDNEILGVIYLKDVIKDGLVERFRELREMGIETVMCTGDNELTAATIAKEAGVDRFVAECKPEDKINVIREEQAKGHIVAMTGDGTNDAPALAEANVGLAMNSGTMSAKEAANLIDLDSNPTKLMEVVLIGKQLLMTRGSLTTFSIANDIAKYFAILPAMFMAAMPAMNHLNIMHLHSPESAVLSALIFNALIIVLLIPIAMKGVKFKGASTQTILMKNMLVYGLGGMIVPFIGIKLIDLIIQLFV

SEQ ID NO: 591 - protein, 292 aa, Staphylococcus epidermidis
MIVLRRLFQDRGAIFAIAIITIYVVLGVLAPLITFYEPNHIDTANKFAGISWSHWLGTDHLGRDVLTRIIYAIRPSLLYVFVALIISVVIGAILGFISGYFPGYIDAIIMRICDVMLAFPSYVVTLALITLFGMGVENIIIAFILTRWAWFCRVIRTSVMQYIEADHVKFAKVIGMNDLTIIRKHILPLTFTDIAIIASSSMCSMILQMSGFSFLGLGVKAPTAEWGMMLNEARKVMFTHPGMMMTTGVAIVIIVMAFNFLSDALQMAIDPRMSAKEKRLALKKGVKARDTA

SEQ ID NO: 592 - protein, 396 aa, Staphylococcus epidermidis
MKGAMSWPFLRLYILTLMFFSANAILNVFIPLRGHDLGATNTVIGIVMGAYMLTAMLCRPWAGQIIARIGPIKVLRIILLINAMALVLYGFTGLEGYLIARIMQGVCTAFFSMSLQLGIIDALPEKYRSEGVSLYSLFSTIPNLLGPLIAVGIWHVENMSIFAIVMIFIAVTTTLFGYRTTFANTQKEVSPKDEVLPFNAMTVYVQFFKNKALFCSGMIMILSSIVFGAMSTFIPLYTVREGFANAGIFLTIQAITVVIARFYLRKYVPSDGLWHHRFMMIVLTLLMVASVIVAFGPHIVSIFVYISAIFIGITQALVYPTLTTYLSFVLPKIGRNMLLGLFIACADLGISLGGVLMGPISDTVGFKWMYILCALLVTIAMTLSKIRQRQSVSKAS

SEQ ID NO: 593 - protein, 472 aa, Staphylococcus epidermidis
VGSTVKYRKFILPIVVGLIIWALTPIKPDALNDQAWFMFAIFVSTIIACITQPMTIGAVSIIGFTIMILVGIVDTKTAVQGFGNSSIWLIAMAFFISRGFVKTGLGRRIALQFVKLFGKKTLGLAYSLVGVDLILAPATPSNTARAGGIMFPIIKSLSESFGSSPRDGSERKMGAFLIFTEFQGNLITSAMFLTAMAGNPIAQSLAEKTAHVQITWMNWFVAAIIPGLISLIVVPFIIYKLYPPTVKETPNAKKWATEQLEEMGHMSIAEKLMVGIFIIALALWVLGSFINVDATLTAFIALALLLLTGVLAWSDILNETGAWNTLVWFSVLVLMAEQLNKLGFIPWLSKLIAQGLNGFSWPIVLVLLILFYFYSHYLFASATAHVSAMYAALLGVAVASGAPPLFSALMLGFFGNLLASTTHYSSGPAPILYAAGYVTQKRWWTMNIVLGIVYFIIWIGVGSLWMKLIGMM

SEQ ID NO: 594 - protein, 391 aa, Staphylococcus epidermidis
MKDNKMLFIIFMIGTFTVGMAEYVVTGLLTQIADDMKVSISSAGLLISVYAISVALIGPLMRIITLKVHAHRLLPILVAIFIISNLVGMLAPNFNVLLLSRLMSAAMHAPFFGVCMSVAATVAPPAKKTQAIALVQAGLTIAVMLGVPFGSFLGGFANWRVVFGFMIVLAIITMLGMIKFVPNVSLSAEANISKELTVFKNPHILIVIAIIVFGYSGVFTTYTFMEPMIRDFSPFKIVGLTVCLFMFGLGGVIGNLITGNVPEDKLTKNLYLTFLLLFVTIILFVTVIQNSILALIICFLFGFGTFGTTPLLNSKIILSGKEAPLLASTLAASIFNVANFLGAIIGSILLSIGLPYIQITLISGGIIVLGMLLNLVNQLYEKKHITFNEYS

SEQ ID NO: 595 - protein, 336 aa, Staphylococcus epidermidis
MAVKVAINGFGRIGRLAFRRIQEVEGLEVVAVNDLTDDDMLAHLLKYDTMQGRFTGEVEVVDGGFRVNGKEVKSFSEPDASKLPWKDLNIDVVLECTGFYTDKDKAQAHIEAGAKKVLISAPATGDLKTIVFNTNHQELDGSETVVSGASCTTNSLAPVAKVLNDDFGLVEGLMTTIHAYTGDQNTQDAPHRKGDKRRARAAAENIIPNSTGAAKAIGKVIPEIDGKLDGGAQRVPVATGSLTELTVVLEKQDVTVEQVNEAMKNASNESFGYTEDEIVSSDVVGMTYGSLFDATQTRVMSVGDRQLVKVAAWYDNEMSYTAQLVRTLAYLAELSK

SEQ ID NO: 596 - protein, 178 aa, Staphylococcus epidermidis
VKRLKNFILGLLIVAIVGFLLFMYIDDSRIQSYQDYFLQFNWFQPLLIGLAGLLILIGLILVLSIFKPTHRKPGLYKNFDDGHIYVSRKAVEKTIYDTIAKYDQVRQPNVVSKLYNKKNKSFIDIKADFFVPNHVQVKSLTESIRADIKSNVEHFTEIPVRKLEVNVRDQKTSGPRVL

SEQ ID NO: 597 - protein, 430 aa, Staphylococcus epidermidis
MSFLRKHTEIIFSYIIGIVSLFTGLIIFINLPLIKQFKGDKKVDTHVHNVWEFLNAFFAEIIKVMSKFIGGFPITSAIVIIVFGILVMLLGHTLFRTIKYDYDISIFFLVIGIMYFIITLLLMTQVYGFFAIVFIIPFTVHIGYIVYKDELNQDNRKNHYMWIIVTYGMSYLITQISLYGRIDANEIESIDILSVNTFFIIMWLLGQMAIWNFLFLRRSLPLTKEELGEEEPELSRTNKGNVSNQTKVHLKQLQNKTTEYARKTRRSVDLDKIRAKRDKFKQKINSIVDIQEDDIPNWMKKPKWVKPMYVQLFCGVIILFFAFLEFNNRNALFLTGEWELSQTQYVVEWVTLLLLLFIIIIYIATTLTYYLRDKYYYLQLFMGSILFFKFLTEFINIMVHGLLLSIFITPILLLMLIAMIVAYSLQLREK

SEQ ID NO: 598 - protein, 221 aa, Staphylococcus epidermidis
MQQETTSWYKQEWFIVLSLLFIFPLGLFLMWKFSKWPSIARTIITVAISVIVLASITYYGNLQMIVPATSNSNNETKETTENNVNDKDERNHKTAVEETKTNYDSTKENTKEPGKENESATRLENSALEKAKSYYDDFHMSKLGIYDILTSEYGEKFDKEDAQYAIDHLEADYEKNALEKAKSYAKDMHMSNDSIYDLLVSNYGEKFTESEAKYAIEHLDN

SEQ ID NO: 599 - protein, 36 aa, Artificial Sequence
  Description of Artificial Sequence:  Synthetic Peptide
RLAGLLRKGGEKIGEKLKKIGQKIKNFFQKLVPQPE

SEQ ID NO: 600 - DNA, 107 bp, Artificial Sequence
  Description of Artificial Sequence:  Synthetic Primer
cgaataatacgactcactatagggagaccacaacggtttcccactagtaataattttgtttaactttaagaaggagatatatccatgcagaccttggccggcctccc

SEQ ID NO: 601 - DNA, 48 bp, Artificial Sequence
  Description of Artificial Sequence:  Synthetic Primer
ggcccacccgtgaaggtgagccggcgtaagatgcttttctgtgactgg

SEQ ID NO: 602 - protein, 13 aa, Artificial Sequence
  Description of Artificial Sequence:  Synthetic Peptide
PKYVKQNTLKLAT

SEQ ID NO: 603 - protein, 13 aa, Artificial Sequence
  Description of Artificial Sequence:  Synthetic Peptide
YPKFVKQNTLKAA

1-34. canceled.

35. A hyperimmune serum-reactive antigen comprising a sequence of SEQ ID NO:56 or SEQ ID NO:414 or a hyperimmune fragment thereof.

36. The hyperimmune serum-reactive antigen of claim 35, further defined as comprising a hhyperimmune fragment of at least 6 amino acids of SEQ ID NO:56 or SEQ ID NO:414.

37. The hyperimmune fragment of claim 36, further defined as comprising a fragment of at least 8 amino acids of SEQ ID NO:56 or SEQ ID NO:414.

38. The hyperimmune fragment of claim 37, further defined as comprising a fragment of at least 10 amino acids of SEQ ID NO:56 or SEQ ID NO:414.

39. The hyperimmune fragment of claim 36, is further defined as comprising a fragment from:
amino acids 5-39, 111-117, 125-132, 134-141, 167-191, 196-202, 214-232, 236-241, 244-249, 292-297, 319-328, 336-341, 365-380, 385-391, 407-416, 420-429, 435-441, 452-461, 477-488, 491-498, 518-532, 545-556, 569-576, 581-587, 595-602, 604-609, 617-640, 643-651, 702-715, 723-731, 786-793, 805-811, 826-839, 874-889, 37-49, 63-77, or 274-334, of SEQ ID NO:56; or amino acids 9-33, 56-62, 75-84, 99-105, 122-127, 163-180, 186-192, 206-228, 233-240, 254-262, 275-283, 289-296, 322-330, 348-355, 416-424, 426-438, 441-452, 484-491, 541-549, 563-569, 578-584, or 624-641 of SEQ ID NO:414.

40. A helper epitope of a hyperimmune serum-reactive antigen or antigen or fragment thereof comprising a sequence of SEQ ID NO:56 or SEQ ID NO:414.

41. The helper epitope of claim 40, further defined having an amino acid sequence of amino acids 6-40, 583-598, 620-646, or 871-896 of SEQ ID NO:56 and being a T-cell epitope.

42. A method of preparing a vaccine against Staphylococcus aureus or Staphylococcus epidermidis comprising:
obtaining a hyperimmune serum-reactive antigen comprising a sequence of SEQ ID NO:56 or SEQ ID NO:414 or a hyperimmune fragment thereof; and
formulating that hyperimmune serum-reactive antigen in a vaccine composition.

43. A vaccine comprising a hyperimmune serum-reactive antigen comprising a sequence of SEQ ID NO:56 or SEQ ID NO:414 or a hyperimmune fragment thereof.

44. The vaccine of claim 43, further comprising an immunostimulatory substance

45. The vaccine of claim 44, wherein the immunostimulatory compound is a polycationic substance, an immunostimulatory deoxynucleotide, alumn, Freund's complete adjuvant, Freund's incomplete adjuvant, or a neuroactive compound.

46. The vaccine of claim 46, wherein the immunostimulatory compound is a polycationic substance further defined as a polycationic peptide.

47. The vaccine of claim 46, wherein the immunostimulatory compound is a neuroactive compound further defined as human growth hormone.

48. An antibody against a hyperimmune serum-reactive antigen comprising a sequence of SEQ ID NO:56 or SEQ ID NO:414 or a hyperimmune fragment thereof.

49. The antibody of claim 48, further defined as a monoclonal antibody.

50. A method of producing an antibody comprising:
initiating an immune response in a non-human animal by administering a hyperimmune serum-reactive antigen comprising a sequence of SEQ ID NO:56 or SEQ ID NO:414 or a hyperimmune fragment thereof to said animal;
removing the spleen or spleen cells from said animal;
producing hybridoma cells of said spleen or spleen cells;
selecting and cloning hybridoma cells specific for said antigen; and
producing the antibody by cultivation of said cloned hybridoma cells.

51. A method of producing an antibody comprising:
initiating an immune response in a no- human animal by administering a hyperimmune serum-reactive antigen comprising a sequence of SEQ ID NO:56 or SEQ ID NO:414 or a hyperimmune fragment thereof to said animal;
removing an antibody containing body fluid from said animal; and
producing the antibody preparation by subjecting said antibody containing body fluid to purification steps.

52. A method of treating or preventing infection or colonization by a Staphylococcus bacteria comprising:
obtaining a composition comprising a hyperimmune serum-reactive antigen comprising a sequence of SEQ ID NO:56 or SEQ ID NO:414 or a hyperimmune fragment thereof or an antibody against such a hyperimmune serum-reactive antigen; and
administering the composition to a subject to be treated or protected from infection or colonization by the Staphylococcus bacteria.

53. The method of claim 52, wherein the hyperimmune serum-reactive antigen comprising a sequence of SEQ ID NO:56 or SEQ ID NO:414 or a hyperimmune fragment thereof is further defined as a hyperimmune fragment comprising at least 6 amino acids of SEQ ID NO:56 or SEQ ID NO:414.

54. The method of claim 53, wherein the hyperimmune serum-reactive antigen comprising a sequence of SEQ ID NO:56 or SEQ ID NO:414 or a hyperimmune fragment thereof is further defined as a hyperimmune fragment comprising at least 8 amino acids of SEQ ID NO:56 or SEQ ID NO:414.

55. The method of claim 54, wherein the hyperimmune serum-reactive antigen comprising a sequence of SEQ ID NO:56 or SEQ ID NO:414 or a hyperimmune fragment thereof is further defined as a hyperimmune fragment comprising at least 10 amino acids of SEQ ID NO:56 or SEQ ID NO:414.

56. The method of claim 52, wherein the hyperimmune serum-reactive antigen comprising a sequence of SEQ ID NO:56 or SEQ ID NO:414 or a hyperimmune fragment thereof is defined as comprising a fragment from:
amino acids 5-39, 111-117, 125-132, 134-141, 167-191, 196-202, 214-232, 236-241, 244-249, 292-297, 319-328, 336-341, 365-380, 385-391, 407-416, 420-429, 435-441, 452-461, 477-488, 491-498, 518-532, 545-556, 569-576, 581-587, 595-602, 604-609, 617-640, 643-651, 702-715, 723-731, 786-793, 805-811, 826-839, 874-889, 37-49, 63-77, or 274-334, of SEQ ID NO:56; or
amino acids 9-33, 56-62, 75-84, 99-105, 122-127, 163-180, 186-192, 206-228, 233-240, 254-262, 275-283, 289-296, 322-330, 348-355, 416-424, 426-438, 441-452, 484-491, 541-549, 563-569, 578-584, or 624-641 of SEQ ID NO:414.

57. The method of claim 52, further defined as a method of vaccinating the subject against infection or colonization by the Staphylococcus bacteria.

58. The method of claim 52, further defined as a method of treating Staphylococcus infection or colonization in the subject.

59. The method of claim 52, wherein the Staphylococcus bacteria is further defined as a Staphylococcus aureus.

60. The method of claim 52, wherein the Staphylococcus bacteria is further defined as a Staphylococcus epidermidis.

61. A method comprising:
providing an antibody preparation from a plasma pool of a given type of animal or from a human plasma pool or individual sera with antibodies against a specific pathogen, tumor, allergen or tissue or host prone to auto-immunity;
providing at least one expression library of said specific pathogen, tumor, allergen, or tissue or host prone to auto-immunity;
screening said at least one expression library with said antibody preparation;
identifying antigens which bind in said screening to antibodies in said antibody preparation;
screening the identified antigens with individual antibody preparations from individual sera from individuals with antibodies against said specific pathogen, tumor, allergen or tissue or host prone to auto-immunity; and
identifying a hyperimmune serum-reactive antigen portion of said identified antigens and which hyperimmune serum-reactive antigens bind to a relevant portion of said individual antibody preparations from said individual sera.

62. The method of claim 61, where in said least one expression library is a ribosomal display library, a bacterial surface library, or a proteome.

63. The method of claim 61, further defined as comprising:
providing an antibody preparation from a plasma pool of said given type of animal or from a human plasma pool or individual sera with antibodies against said specific pathogen,
providing at least three different expression libraries of said specific pathogen, screening said at least three different expression libraries with said antibody preparation,
identifying antigens which bind in at least one of said at least three screenings to antibodies in said antibody preparation,
screening the identified antigens with individual antibody preparations from individual sera from individuals with antibodies against said specific pathogen,
identifying the hyperimmune serum-reactive antigen portion of said identified antigens which hyperimmune serum-reactive antigens bind to a relevant portion of said individual antibody preparations from said individual sera,
repeating said screening and identification steps at least once,
comparing the hyperimmune serum-reactive antigens identified in the repeated screening and identification steps with the hyperimmune serum-reactive antigens identified in the initial screening and identification steps,
further repeating said screening and identification steps, if at least 5% of the hyperimmune serum-reactive antigens have been identified in the repeated screening and identification steps only, until less than 5% of the hyperimmune serum-reactive antigens are identified in a further repeating step only to obtain a complete set of hyperimmune serum-reactive antigens of a specific pathogen.

64. The method of claim 63, wherein said at least three different expression libraries are at least a ribosomal display library, a bacterial surface library and a proteome.

65. The method of claim 61, wherein said plasma pool is a human plasma pool taken from at least one individual having experienced or are experiencing an infection with said pathogen.

66. The method of claim 61, wherein said at least one expression library is a genomic expression library of said pathogen.

67. The method of claim 66, wherein said at least one expression library is a genomic expression library of said pathogen with a redundancy of at least 5×.

68. The method of claim 61, further defined as comprising screening at least a ribosomal display library, a bacterial surface display library and a proteome with said antibody preparation and identifying antigens which bind in at least two of said screenings to antibodies in said antibody preparation.

69. The method of claim 61, wherein said pathogen is a bacterial, viral, fungal or protozoan pathogen.

70. The method of claim 61, wherein said pathogen is a Staphylococcus pathogen.

71. The method of claim 61, wherein said at least one expression library is a ribosomal display library or a bacterial surface display library and said hyperimmune serum-reactive antigens are produced by expression of the coding sequences of said hyperimmune serum-reactive antigens contained in said library.

72. The method of claim 61, further comprising isolating identified hyperimmune serum-reactive antigens.

73. The method of claim 61, further comprising producing isolated hyperimmune serum-reactive antigens by chemical or recombinant methods.

74. The method of claim 73, further comprising formulating the produced hyperimmune serum-reactive antigens in a pharmaceutical preparation.

75. The method of claim 74, wherein said pharmaceutical preparation is a vaccine.

76. The method of claim 61, wherein said antibody preparation is derived from at least one patient with acute infection with said pathogen.

77. The method of claim 76, wherein said at least one patient has an antibody titer to said pathogen of higher than 80%.

78. The method of claim 61, wherein at least 10 individual antibody preparations are used in identifying said hyperimmune serum-reactive antigens.

79. The method of claim 61, wherein said relevant portion of said individual antibody preparations from said individual sera are at least 10 of all individual antibody preparations used in said screening.

80. The method of claim 61, wherein said relevant portion of said individual antibody preparations from said individual sera are at least 20% of all individual antibody preparations used in said screening.

81. The method of claim 61, wherein individual sera are selected which have an IgA titer against a lysate, cell wall components, or recombinant proteins of said pathogen above 4000 U and/or have an IgG titer above 10000 U.
